United States Patent Application Publication US 2025/0195589 A1 - sequence listing, part 11

SEQ ID NO: 20 - DNA, 2422731 bp, Lactobacillus crispatus
  source 1..2422731: mol_type = genomic DNA
ttgttcgacattaataaattttgggaacactttaatgacgagatgcgtgctcgtttcaacgaagttgcctacaatgcatggttcaaaaatactaaacctatttcatataatggaaaaacacatgaattaaaaattttagttcaaaatcctgtttctaaaggttactgggaaaagaatctatcttctcaattgattcaatctgcctacggttatgccgacatcgagatcttacctgtatttaaaatatctgaagatgcggatattacagaaaggatcgtaacacctgcgccaaagcgtgatgcgcaagttcaacagcctaatttgccagaaaaagaattcactaaagacttgaagttaaacgaaaaatacacttttgataacttcgttcaaggtgagggaaacaagttggccgccggtgctgcacttgctgtagccgacagtcctggtagtttttacaatcctttatttatttttggtggcgttggtttaggtaaaacacacctgatgcaagctgttgggcatcaaatgctagcagagcgacctaacgcaaaagttgtctatatacagagtgaaacttttgttaatgacttcattaattccatcaaaaataaaacgcaggacaaattccgcgaaaaatacagaacttgtgacctgcttttagttgatgatattcaattttttgccaaaaaagaggggattcaagaggaattcttccatacttttgagacactttataacgatcaaaaacagatcgtaatgactagcgatcggttgcctacagaaatcccagatctatcagagcgtttagtttctcgatttacatggggcttgcaagtcgaaattacgcctcccgatttggaaaccagaatcgctattttgcgacgcaaagctgaaacagaaggtttgactatcgatgatggtacgcttaactatattgcatctcaagttgatactaacattagagaacttgaaggggctttagttaaagttcaagcttatgccacaattgaaaaagcagatattgacgttaaccttgcgcgtgaagcattagttgacctcaaattagttcaaaaaaatcgtggattacaaatctctaaaatacaggaggttgtcgcaaactatttccaaacttcaactgctgaattaaagggtaaaaagcgtgtacggcagattgtagttcctcggcaaatagcaatgtatctttctcgtgaattaacagatgccagtttgccaaaaattggtcaagaatttgggggaaaagatcataccactgtcatgcatgcttatgataaaatcgacaagcagatgaaacttgattctgatatcaaaactgctgtctttgacctaaagcaaattttggagcactaaaagttatccactgtggaaaaataaacaagttttacacaagtttttaaccgtaacaagtccgttattttaggcttcttatgagttttcaacagaactcacaggccctactactactaattaattatataattactaataaagagaaatcacacagctattcttgggaggaaaaacatgaagtttacaattaatcgcaatctgtttatcgaaaacctcaataatgtaatgcgggccatctcatcaagagctactattccaattcttagtggaattaagttagacttaacagaagataaacttacgttaacgggtagtgatacagatatttcaattgaaattcaaattccagtcaatgatgatttaaatgtggaatctacaggttctattgttttaccagctagattctttagtgaaatcgtaaaaaaattacctggtaaagacttctcatttgaagtaaaagaaagttttcaaactcagatcatatctgaaaatagtgaatttacaattaatggtttagatgctaataactatccacgtttaccagaaattccagatgctgcttcattcactatttctggtaaaactttccgtgaaatcattaatgaaacgcaatttgctacttccaatgatcaaacacgagcaattttaactggggtacgtttcttctttagtccagataaaattaaagctgtcgcaactgattcccaccgtttatctcaaagaacaattgctttagaaaacggacctcaagctgaaactgatttgattattcctggtaaaagtttgcaggaattagctagaatcattggtgaagctgatccagaagttaaagtttgcccaggtgataaccaagctttatttgtaattggcaacttgtccttctattcacgtcttttggacggaaattatccagacactgatcgcttgattccgactgaaaagaccactagtgttgaatttgacatttccgaattatctagtgcccttgaacgtgccagtttgttaactcatgctggccgtaacaacgtggttactttgactttggatatagaaaatcaatcagctaagttatcaggtaaatctgcggaaattggtaatgttgaagaagatgttagcttcagaaatcttgaaggaaacaatttagagatttccttcaaccctgactatatgcgtgatgcgttaagagcttcagtaacagattctgtaattatgagttttactaagccacttcgtccatttatcattaatccagataaagaagacattgaatttgtgcaattaattacgccagttagaacatattaatcaagtacacaatatttaggtcataaaaagtcgtcaaataaggcgactttttattttgctgtgtgtcgggcatggcatttgtctagtctagtgaaagtctagatcacgggtagttgtcgccaagtgtagcgaaccacaagccgttagcggtgacgctatgggtgaaggaagtggctagcgagttttccgagcctacgtacagaaacctggtcaggccaaatggtggatgagactgcagcacaagttaaagtccaaaggacaaccgtaaaaccaagacggtaaaccagggggcagtggaaaattaaagatgaatgtcttaccccgagagatctcgtggacaggtgaaaccgagtaagctttaatatcagcgatcgtaagcctggtcgaaaaaggttaatcgcgagaagtcagctgaggtcgtagtagtgctgaaggttttgtaatgaaactggagcgaagggcctaatgtttgtaagagcatatctcgctataagcaatgttcagacagtccggataagaggatagcctagcacaaagagaacgtaactctttgatggtgaaagcaattgggacaattctgaataaatttacaagtagaaatggagatatcacgagatggaactaattgaacagattttaagtcaaaataatctcaaggaagcaatcaggagagtcaaaatcaataagggagcgcctggtgtagacaggagaacagttgatgagcttgatagctattttaaaaagcatcaagtagaaataaaggacgccatcatgaagatgaagtatcgtccgcaagctgttcgcagagtctacattcctaaagctaatggtaagaaacgtcctttaggaatacccacggttgttgaccgagtaatccagcaggctattgcccaagtattaatgaagatctatgatcctcattttagtgagcatagctatggctttagacctggacgcagtgctcatgacgctattgaacaagtcttggaatatttaaacgaaggctatcaatgggttgttgacctggatattgagaaatactttgacacggtaaatcatgataaattaatttcaataattagagagcaagtaaatgacaaaaccaccctccatttaattcgagcctttcttaaagctggagtaatggaagatggttgggttaagcctaataaactaggtgtaccacaaggcggccctctttcaccaattctatccaatatctatttagataaaatggataaagaattggaacaaagaggcctgcgctttgtccgctatgccgatgactgcaatatctttgtcaaaagcggtaaatcagccaaacgtgtgatgaattcaatttcatcatggctagaaagaaagctattcctaaaggtcaacgcaaccaaaaccaaagttgtacgaccaaccaagagcaactttcttggctttaccttctggaaaagtggcgaatactggcaagcaaagccaggagatgaccgcaaaatcaagctttatgacaagatgagagaacttctctgtcgcagaaaagcagctgctcagcctctatcactagtctttactaagataaatcaagtagttagaggctgggtcaattactttagagttggcgacatgaaatattttctaattaagttcagtcaatggctgcgtcataaagtacgggtggtaatcattaaacaatggaaactaccaaaacgaatatacattaacttaatgcggattaacaaggcactaaagtgcaattttagtgatgaagatattcataaagtagctaatacgcgcttaggttggtataaaagaagtacgggttatgtcattaactttctgcttagcccaaaagtattgggcataagcaaagcggatcgcccaggcttggtcgatccgctagaatattatttatctcgtaaataatcacaaacgtagcgccggatacggaaccgtacgtccggtgcaatgagaggggcgagttataaaactccctctactctattttaaacgaaaacgcaaaatattggcgtatatttatttttttaccgtgctagtgtgattaggttattttgaaaaaaagctctgaaaaggcttataagagcgatttagtttgttatttgtgttgaaaactaatataattatataggtataaagcgtattgaaggtgagcattattaagtattttaaagttgacggcgatcatattactttggggcaatttctgaaggaagagagcattatttcatcaggtggacaagctaaatggtacttaaaagataatccagtaactttaaatggtgaacttgaagatcgaagaggcaaaaagatgcatgttggtgatcacgtagtggttaatggccaagaatatgagtttcggtagggaagtcaatgtatcttgatcattttactgtacagaattttcgtaatttaaaaaagcttgacgtaaattttgattcaaacgtcaatatttttattggcaaaaatgctcagggcaagaccaatttgctagaggcaatctattttttagcattaacacgttcacataggaccaataatgataaagatttaattggtttcggcggtgagtttaccaatttacttgggcatgtacataaaagccaagtggatcttgatttacgtgttttgatcacccaaaaaggtaaaaaagtatggattaatcgagttgagcaggcgaagttgtctaaatacgtaggtcagctgaatgcgattttattttcaccggaagacctcgagttgatcaagggtgcaccagcactgcggcggagatttatggatcaagaatttggtcaaataaatgcagagtatttatacttcgcaagtaagtatcggcaagttttaattcaaaagaataattatctgaagcagctagctaaaggtaaggcaaaggatcaggtctttttagatgtactttcagatcaactagctggtatcgccgctgaagttgtctttcgacgatttaaatttcttaagtatcttagtcactatgctagcgatgcttatgcacatattagtttgggcagtgagcagctttcaattgcttatcatccatcagtggctgacatccaagctgatgacagtacagaagaaatttatcaaaagattttagcaagttatgcacgaaataaggcaagtgaaattcgcaaggggacaactacttctgggccgcaccgtgatgatattgaatttaaacttgatggtcaaaatgcacatctttatgcttcgcaagggcagcagcgttcaattgcacttagcgtcaagctggcggaaattcaattggtgcatcaactaacagatgagtatcctttactcttgctggatgatgtaatgagcgagttagatcatggtcgacaaagtgcgctacttaattatattcatgggaaaacgcaaacctttattactacgactgacttagaggggatttcctgggaaataattaaaaagccgcgtgtgtatcacattcaatcaggcaaaattagtttggagaaggagaattaaatggctgataattcaaaagaaaatcttgaaaaggtcaaaaaatatgaaaaagaggctgacaagtataatgccagtcaaattcaggttcttggcggtctagaagctgtacgtaagcggccaggtatgtatatcggttcgactagttctcagggattgcaccacttagtgtgggaaattattgataacagtattgatgaacgacttgctggttttgcgaccaagattgaagttacgattaacgaagatggtagtgtcaccgttcaagatgatggacgtgggattcctgtagatattcaagaaaaaacaggtcgtcctgcattagagactgtatttactgtacttcacgccggtggtaaattcggcggtggtggatataaggtttctggtggtttgcacggagttggggcttcagtagttaacgctctgtccactaaacttgatgttaccgtaatgcgtgatagcaaaaagtactttatcgatttcgatcatggccgtgttaaggatgagatgaaacaaattggcacggttccacttgatgaacatgggacgattgttcacttctatccagatccagatattttcacagaaactattgtttttgatgacaagatcttgaagaacagaatccgtgaattggcctttttgaacaagggattaactttaacctttactgacaagcgtaaagacactgccgaaacagatgtgtataagtttgaaggtgggattaaggaatacgttgcctttttgaacaagggacaagaagtattatttgatgatccaatttatgttgaaagcacctataatggcattgatgttgaagtggctttgcaatatacaaatggctataagactactttgatgacttttgccaataatattcacacctatgaaggtgggatgcacgaggccggttttaagactgcgttaacacgtgtggttaatgactatgcacataagtctaagatcttgaaagataaggacgataatctttccggtgaagacattcgtgaaggaatgacagctattgtctcagttaagcaccctagtccgcaatttgaaggtcagactaagaccaagttaggtaattcggatgctagaactgctgtagataaggctttttcagaaacctttagtcgtttcttgatggaaaatccttcagttgggcgcaagattgtagaaaagggtcaattagccgaacgagctagaactgctgccaagcgtgcacgtgaagtaacaagaaagaaatctggtctggaaattgctaatttaccaggtaagttagccgacaatacaagtaacgatccaagtatttcagaactgtttatcgtcgagggtaactcagccggcggttctgctaagcaaggtagatcacgtttaacacaggctattttgccaatcagaggtaagattttaaatgttgaaaaagcttcgatggatcgaatcttggctaaccaagaaattagatctttattcacagctttaggaacaggctttggtgctgactttgacgtttcaaaagcacgttatcacaaattgattatcatgactgatgccgatgtcgatggtgcccacattagaaccctgctgttgaccttgttctataactatatgcgcccaatgatcgacaagggctatgtttatatcgccaagccacctctataccaagttcgtcaggggaaagtggtcagatatcttgatactgacgaagaattgcatgattacttaggtagcttgcaaccaagtcccaagcctactgtgcaacgttacaaggggttaggtgaaatggacccagagcagttgtgggaaactactatgaatccagaaaatagaagactggatcgggtaagtcctgagtatgctaaagatgctgacgcagtctttgagctcttaatgggaaatgaagtttcaccaagacgtgactttattcaaaagaatgctaaatatgttgaaaacttggatgcataggaggattagatggacgagaatcaaactcaagatcatagaattaaaaacgtcgatctaactagcatgatgcgtagttcatttttggattacgcaatgtcagttattgttgcacgtgctttacctgatgttcgtgatggcttaaagcccgtacaacgtcgtattctttacggtatgagcgagttgggtgtaacgcctgataaaccatacaagaagagtgccagaattgttggggaagttatgggtaagtttcacccccatggtgattcctcaatctatcttgctatggcacacatggcacaagatttctcataccgttacatgttagtcgatggtcacggtaacttcggttctgtcgatggtgatgagccagccgcaatgcgttataccgaagcaagaatgagtaaaattgctgtggaaatgttgcgcgatatcaacaaaaacaccattgattggcaaagaaactatgatgataccgaaaatgaaccggttgtcttacctgctagaattcctaacttgcttgttaacggtgctaacgggattgccgttgggatgacaacaaatatcccgccacataacttgactgaagttattagtggtttgcacatgttaatgaaaaatcctgatgctacaaccaaggacttgatgaaagttatcccaggtcccgattttccaactggcggaattattatgggacgtggtggtatctaccgtgcttatgagagtggtaagggtaacattgttgttcgcgccaaaaccaatattgagactgaaaagagcggccgcgagcgcataattgtgagcgaaattccatttatggtaaacaaggctgaattggtgaagaaaattgctgatttggctcgagaaaagactatcgatggaattactggtgtgcgtgatgaatcagaccagacagggatgcggattaccattgatattcgccgtgatgctagtgctagcgttgttttgaataatttattcaagcaaactcaaatgcaggctaactttggtatgaatatggtggctattgttgatggtgcgccacactttttaaccttgaagcaaatgctgcaatattacttggatcaccaagaagatgttgtaactcgcagaacaagattcgagttagctaaggcagaggcaagagcccacatccttgaagggttaagaatcgctctggacaatattgatgaaattgtccacattatccgcaatagtcaatcaagtgacattgctaaagcaactttgattagccgctttggccttgatgataagcaatctcaggctatcttagacatgcgtttggttcgcttgactggcttggagcgcgataaggtagaagctgaatacaaggaattacaagctaaaattgctgactacaaagatattttgtctaagcctgagagaattgaccaaattatctatgacgaattgcttgatattcaaaaacgattcggtgataagcgaagaaccgaaattggtgctagcgaagtcgtttcaattgaagatgaagatttgattgaaaagcaaaatattctgttgacggttacccataacggctatattaagagaatgccaattcaggaatttaagactcaaaaccgtggtggtaaaggtatcaagggaatgggtgtacaagatggcgactttattgagcatttgatttactcaagtacgcacgatctgctcttgttctttactaatgctggtaaggtttactccaagaaagcctatgagattcctgaatacggccgcgcagctaaaggattgccagtagtcaacttattgcaattggaaaagggcgaaaaggtccaaactgtaattaatattccggaaggtgctgacgataattacttattctttgttactaagatgggaactgtaaagcgtacacacgttagcgaattttctaatattagaaacagtggtttaattgccttaactttgaaagatggcgatgaattaagcaatgttttgactactgatggtaagcaaaacatcttaatcgggactcacttgggctacgctgttaacttcaatgaaggcgatgttcgggcaatgggtcgaactgctgctggtgttcgcggaattaacttgcgtgagcatgactatgttgttggttcaggtattttaggtgctgatgaccaagtcttggtaatttctgaaaagggttatggtaaacggactccagcttcagaatatccagttaaaggccgtggcggtaaaggtattaagactgccaatattactgagaagaatggtccattagctggtgtaacaatcattaactcaaataatgatgtgatggtaattactactgacggaattatgattcggtttagaattgatgatgtttcgcaaactggccgtagcaccatgggtgttcgcttgattaaagttagcgatgatagtcaggttgcaagtttaaccgttgttccaactgaggaagaacaagatcaaactggtgacgatgacgactcaaaaaatggataattaattaaaaaaaaaaaaaatttgaacttttaaaaaaattatcaaacttttttgcgtaataaataatgagcagtaaaaaatctgctaggatcacgtgaaaacagtttggtaattttttatttatatgctaaaattagaaattgcgagtaatattccattactccttgttcttgattttagcaagaaccatatagtccagaaggaggtgcaatagtcatggcaactacaaagtacgaagtaacttacatcatcaagccagatgttgacgaagacaacaagaaggctcttgtagaaaactacgataaggttatcgctgataacggtggtactatggtagaatccaaagactggggccagcgtcgtttcgcatatgaaattgataagtatcgtgaaggtacttaccacattatgactttcactgctgacaacgctgacgcagttaacgaatttagccgtttgtcaaagattgacaacgctatcttacgttcaatgaccgttaagttagataagtaattttaatttattatccgttatgtgatttaggaaaggaaggtacatgagtatgattaatagagttgtacttgttggccgtttaacacgtgatcctgaattacgtactactgggagtggaatctcggttgctacgtttactcttgctgttgaccgtcaatttacaaatagccaaggtgagagaggcgcagatttcgtcagctgtgtaatttggagaaagtcagcagaaaacttctgcaactttacttcaaagggttcattagttggaattgatggccgaattcaaaccagaagttatgataataaagatgggcaaagggtatatgtaaccgaagttgttgttgataacttcgcattgctcgaatcacgcaaggatcgtgaagcccgcggtcaaaatggtggttatacaccaaatagtggaaatgctagcagtcaacctgctaacaatttcccaaataatggcggatcacaaggtaattcacagactaataacaatcaaaataattcacaagatccatttagtggctcaggtgatacgattgatatttctgatgacgatctaccattttaaactaaattaaagaaaggattctagaacatggctcaacaaagaagaggcggccgtcgtcgtcgtaaggttgactacatcgcagctaaccacatcgactacgttgactacaaagatgtcgatctgttgaaacgttttatctcagaaagaggtaagattttaccacgtcgtgttactggcactagtgctaagaaccaacgtaaagtagctaatgcaattaagagagctcgtatcatgggcttgttaccattcgttgctgaagactaatttagatcgaaataaaccaaaaggacaggacacaaggttctgtccttttttcgtataataattaaaaaaattctctcttcgtattgtacctactgttttcaatcatgagccggaataaggtataattaacactgatatactatatctattaggaaggatcttcatgaaggattttttacgtaagctagaattgcctgaatttattaaggattcacggctgacagcttctataatcattgcactttctctttcattattgggaagcattattgcgatgattatgaatccattgtttggtttggcaatgcttttagtctttattttgaccgttgcctttgccatctatgggacctatattttagcgggtaatgcgaatagctttgcggttaatttgtcttaccggataaagcgtagtgaacaagaagcaatgattaagatgccgttgggaattttgctttatgattcggatcaccaaattcagtgggttaatccatatctgcaattatatttaaagagtacagatttagtggggcacacaattgaatcagttgaccctgatctgaataagctacttaatgaagcaattgaggcaaaaacagcagaaaatcatctggttgattgggatggtcaccgatttgaaatggtggtccaaaataatttaggcgtaatatatttattggatattacgcgctatgccaaaattgaagataaatataaagctgaacgattggcgattggtcaaattttcatcgataattatgatgagctaagtgaagcaatgcatgatcaagaattgaccagcatgagttcatatgtgcaaaatacattgagtgattatgcgaaaaagtttaacgcatatttaaaacggattgatgaagaccatttcttgatcttgatccatatgcaagaattagctgagatggagaaggacaaattctctgttttagataaggtgcgtcaagaaacgagtagaaacaatacgccacttactttatctatgggaattgcttttgggagtgattctttgtctgaaattgccaaccaggctcaatctaacttggatttggccctaggtcgaggtggagaccaggttgtcttacgtcaacccggtaaagacgcccgcttttatggcggtaagtctaatccgatggaaaagcggactagagttagagcaagaatggtttcacaagcaattagtgaactatttaaagatgccgatcaagtttttgttgttggtcatcagcgtcctgacatggactcagtcggtagtgggattggcgtagtaaaattagctcgtcttcacggagttaaagctaattttgttttagatactaataagacaaactatgatgttggtcgcttggtcaccttaatgcaacagaaaaatcaggataaggatatttttattaaccctgatgtagctttagctcaagttactgacaagtcaatgttggtaatggttgatcattcgaagtattcaattacttactcacggtcactttatgatcgtttgaagaatcgaatcatcgttattgatcaccatagacgaggcgaggaattccctgaaaatccaatgttaacctatgttgaaccatatgcttcttcggcttgtgaattggtcactgaaatgattgaatatcagcagccagctaacggtaagcgagttttgaccgatattgaagctacagcaatgttagccgggattgtggtcgactccaaggaattctcgttgagaacaggaactagaaccttcgatgcggctagttacttacgttcaatcggtgctgactcagcagttgtaagcatgctcttgaaagaggacattgatagtttcctcgaacggacgcatttagtagccactttgaagatggtgaagccacatatggccgtattatgtggacctgatgataagattatagatccgatcattacagcgcaggcggctgatactgcacttgatttggaaaatgtgggtgctagtttcgcaattacgcggcgcagtgataatacgattggtatttcagctagatcaatgggtaagatcaacgttcaaattattatggaaaaattgggcggtggtggacatctttctaatgcggcaacacagattaaagatgttactattgaagaagcaaaacaaaaattgcttgatgcaattgatgaatatgaaaaagaaaatgattaggaaggacaaatatgaaagttatttttactcaagatgttagaggtcgaggtaagcgtggacaagttaaggacgtacctgatggatacgcacaaaattacttgattaagcgaggcttggctaaagaagctactaaaggtaacatgaataccttgaagcgtgtagaagctaatgaaaaggctgcttatgaagcagaaaaggccgaagcagaaaagatcaaggcagaacttgaaaaagacgataccgttgttaacttcaaatctaaggctggtactgactcacgtttgtttggttcaatctcaagtaagaagattgtggaaggccttgaaaagcaatacggtatcaaggttgataaacgcaagcttaacttgccagaaccaattaagactttgggctatactaatgttcatgccaaattatttaagggtgtagaagctactattcgcgttcacgttactgaacaagactaataaaaagtggttgtgattgatggataatatcgtttctcaacaaattccgcatgatcgcgatgccgaaagggcagttctgggtgcgatttttatcgatcctgaagcaattgcggatgctagtgcggtagttcagcctgaagatttctatgagcgggctaatcaaattgtctttcaagcgatgtgggacttgtctgatcgcggggatgcaattgatacgctgaccttgcaggatgaattaaacaaaagaaatcagttagaagatattggtggtatcggttatgtttctgaattagcgatggccacaccgacagcagcgcatgttacctattatgcccaaattgtgcataggaaggcgctgcttcgtcgtttaatctctgctagtcagaagattatctctaatgcaatcgatggctctgacgatgtaacagacattctagatgacgctgaaagtgaaatcatgaatgtctcgtcagagaatagcacaggcggctttaggaccattaaagagatcgttaattcagcgattaatgatattaataatattccggatgacggaaatatggttactggcttgccgactggttttgcggaattagataagatgacaactggttttcacgatgatgaattgatcattgtagctgctcgtcctggtgtgggtaagacttcatttgccttaaatattgcgcaaaatgtagggctacacactgaaaaaagtgtagctatgttctcactagaaatgagtggagagcaactggttcagaggatgttagcttctgaaggactgattaattcacagcacttgagaactggccagcttgatgaagaagaatggcgtaaattggtagtggcttctgggtcactagcaggtgcgcaaatctttatcgatgatacgcccggaatcaagatgagtgaaattcgtgctaaatcacggcgattagctaaggaaaagggcaatcttggtcttattgtaattgactacttgcagctgattgaagggccacgcagtgaatcacggcaacaagaagtttctgctatttcaagacagttaaaaaagctagctaaagagttgcacgtgcctgttattgccctttcgcagttatcacggtcagttgaacaaagacaagataaacggcctgtattatctgatattcgtgaatctgggtcaattgaacaggatgccgatattgtttctttcttgtatcgtgacgattattatcgtgatgaaccagatgatggtgaaagtagcggtagtcaagatgaagttggcgcagaagacgataatggtgaagtagaagtcatcattgaaaagaaccgttccggtagccgggggacggttaagctaatgttttcaaagccattcaaccgtttttcaaatttggattatgcgcatgatcctaatggtaattagaaaaagcactcgatgagtgctttttctatgtttgaatataatacgaataatatttacatttataatggaaattgtttatatttggtgttgaaatgataccataagtttgctataactattactgaaaagagtaataacgaatatactcatggaggaatagcaaatttatgaaatttaagaagattttggttggtgcttgcgccgtcttggcagctgtctcattagctgcttgctcaaatggtaagaagagttcatcttcatccagtgaacctaaggaattaaacgttgagtttgtgccaagtactcaagccaacaagatggaggctaaggctaagcctttaggtacgcttttacaaaagcaattgcatatcccagttcatgtgaccgtttctaccgactatagcggtctagttgaagcaatgtcatctaagaaagtagacgtcggcttcatgccaccatattcttacatattagctcataaaaagggaattgctgatgttttattgcaagccgaacgttacggctatgatgaaccatccggtaagatgaatcataccttaatgcataagtatcgtggtatgatcgtggttaagaagggctcaaagatcaaatcttggaaagacttaaagggtaaaaagattgcgattggcgatcctagttcttcatcgggctatgtttatccagttgcggaactttacaaaaagggtttgaatgtaaccaaggactgcaaattagttaatgttaagggtgacgatcaagaagtgttatccgttttgaatggggatgttgatgccgcattcgtcttctcagatgcacgtaatattgccgctaaggatgacaagaaagcaatgaccgatgttgtgccaatctactttaccaagtggattccaaacgatactattgcggttagaaaagatatgcctaaaaaattcagagttaagttagctaaggctttcaagaatattgctaagtctaagaagggtaagcaaattatcgaaagcatttataaccattatggttatgttgaagctaaggattccgactttgatggcttacgtcaataccaaaagatcgttaacaaagctactggtggcagtaactaaaatagaataatttaattgaaagggctcaccattacgggtgagttctttttgtttctatataatatatcagttaaaatagacataaaagaaatgaagaaagaagaaaaatatgaaaattgcggttttaactgatagctcagcttatttaactaaagaacaacaagaaaaatatcaaatcgatgttttgccaattccaattatttggggcaaaaaagtatatcatgacttagtcgatattggttatgaagaattttatcaaaaactaaatacagcaaaagagctgccaactacttcgcagccttcaatcggtgatcttaagcagaagattgatgaatacgtggcagcaggctacacggatgttattgtaattactctttcaagtgggatttctagctatttctcaaccgttcagagtgttgcggcagaagaagaccgaatcaaggttcatccattcgatagtaaaattacctgtgctggtgaggcggattatgctatgttggcaggccgtttaatcgaggctggagcggatattgatttgatcatgcatgatcttaaggacctgcaaaaaacgatggatgtgcgctttatggtggacgatttgagccatttaaagcgtacaggtcgtttgtctaatgcggcaagttttgttgggacgctgtttaagattaagccgattttatcgatggatgtgcaaaatgaaggccatatttcagcgattgcgaaagagcgtcaatataaacgtgcatacaagcatgtgcaaaatgattttgataatttgactaaaaatatgccgtataagattcaggacacaatttttgattcacttgatcctgagaaaaaacaggcctggcttgatgattaccgagctaagttccctaagtataagtttgatactagtattatcggccctgttgttggggttcatgtaggtcaaggtacaatgtcgatgatctggtgccgtgatttggatacttattttgatgaaaatggtcagccaatcaagggaattgagtcacaagcagtagtggatccagagtaagcataataccgatatggcaaaaaaatgagaggcactattgtttttttaatatcattgctatattattattaataatttaatatggcgatgaatagggatgatcagagtgtcaatcagttctttttttaaaaagttaatagccaaaaataaactcttgtttttagctatggtgattactagtgcttttgcttctttagatggcgtcatttctccttatgttattgggaaaattactaatacactttctcagaaacattttagtgagataccgaaaatcttgttactgtatctgttgatgatgctttttctgaatgttagcttttatctatggcaattttgttggggaaaaattaccaaatcaagtaatgaattattgagatctacagcttttaataattttattgcttcccctagtgaaaagaaaatcactaataccctgaattttatcaatgttaatgttaaacaaattgaaaatcaatgtattgattcaacaattatgcttgtttactgcgttgagcaagccatcgtttcattagtttatattttaagtattaatggcattgcagcaatggttttcttagtttgtgggttaattccatcagttattccacgtttaactcgtaattgggttcagacaggaactaaaaagtggaatagcagttatgaaaactataatcaaaaaacaagtgatgctgtgcatggtttcgatactatcagacatgcaaatggtgataatagattcaaaatatttgtccaaaaagcattaatgggagaagaaaagaagtattttttgatgaattttcggcgtaatacttctaattttttagcccaggtctcttattcattatcaatggttatttctttggctgttggtacattctttgtaattaatggtcaaattctagtaggtggtttgatttctctatttttagcatcagatcgtttaactagtccaattatttcgattgttaatattgcaaatcaattgacctctgttagtcctctgctaaaaaataaagctttacaaaaatctaaaaagcaagaatttaataatttagacttcaccaaattaccaaaccaagagaaaataatttttgatcactgcaatttagggtattctaataaagctattttgaagaatattaatttgacagtttctaaaggcaataaagtattgatcatcggtcgttctggtattggtaaatccactctgttcaagacattgcttaatgaaattccattgctaaagggcaaaatactggtggatgatagtcttaaccaagctaatttctataccaattttggtattgttagtcaggatacttatatattcgctgaatctttgcgctttaatttaacgcttggaaaagattttcctactcagcaagtaataaatgttttgaaaactgttaaattaagttatttagctaatgaaaaaagcttagacatgcagatcggggagaagggattatcactttcgggtggagaaaaacgaaaactggaaattgcacgagctttattgaatcaaaaatcgattttacttgttgacgaaggactatctggacttgatgaagaaagcaataaacaaatttttgcacttcttcaaagtcttccgcagacagtaattgaaattgaacatgctgttagtccagaagagaaaaatcaatttaatcaaattattgatctaggagctcagtattgatttttttataaataaacaaaaacaattacatacgtataaaagcctttacacataaagacttttttatttataatattagcagcacgaaaactttttggagaaaaacttacatacagaaaaggatgagaatatggcagaaaagaaatatgtcggcagtatcgaagcaggcggtactaaatttatcgtagctgtgcaagatgttgaaacaggtaaggaagtagcgcgtgatcgtattcctaccactactaacaaggagactttacaaaagactgctgagtttttcaaaaagcaccccgttgatgcattaggaattggtacttttggtccaattgatatcaatcctaactctcggacttatggttacattttggacacgcctaagccaggttggtcaggtacggacgtaaagggcttttttgaaaaggaattaggtattccggttgccatgacaactgatgttaatgcatcatgttatggtgaatatgttgctcgcggccgcaatgattctaagagttacttctacgcaacggttggtactggcgttggcgctggaattgtacaagcaggtaagttgctcggccttaataatcacccagaaatgggccacatgttggttcgtcgttatcctggtgatgattatgagggtcactgtccattccataatgatgcttgtgtcgaaggcatgtctgctggtccaagtcttgagggcagaactggtatccctggtgaaaaattgtctcgcgataacaaggtcttcacttattctgcgtattacattgctcaaatgctcttcaatgtttacatggctgctcgtccagatgtaatgattgttggcggttcagttttaaatgaagatgatttggttaaggtaagaaagttctttgatgaatttaacaacaattacgttgccacacccgatttgaatgaattaattgtgcgtcctgctgtggctcacaacgggtctgcaactcttggcgattttgaattagctaagaatttgctcaaataaaaaagcatagataaattgaataagcaataaaaaggctcaactcgttaagaaagacgtaaggcgagccttttttgacgtaatttgacctaaatgcgcgtaatattaattctagaaacgtaaccggtttattaagaaaggagcccaactatgaacaaatcagatagtggcttaaaagacaaagttatcggtaaagtgaaagaagtcgaaggtaaaattaccggcgataaatcacgcgaagtccaaggaaaagctcaacaagccaagggcaaagttaaggacaaagccaaaaaattaaaagatgatctggaaaaagaccatcaaatagatgaagattgttaaagactcaggtcgactagcaatagctaaacagaaagcaaataggtgatcctatgttatcatggatctgggttttaatcgttggcgctataataggtctaatagctggtttcataaccggcaagggtggatcaatgggatttctagctaatttaatagcagggctggttggttcaaccttaggccaagcaatctttggttcgtgggggccgcaaatggctgggatggcaatcgtaccatcaatattgggagccgtcatcttggtactagtggtttcctttgtactagggatgcttagaaaaactgaataaaaatagaataagagaaaaaagacatgctgggcatgtctttttttgtgtttcatgtgaaactattttagcttttttcgttcattttctttctcagctaaaaaacgttgcttaatttcttcaggcaaaagactagggaccgtcttgtcataaaattcaaagaatatgggtgccttgttagagtcattgctcttgggatataaggcaaagtcactttcgctaaacggtaagctgatattaccacgtaaagcattgataatctcaccgaacatatgcaaaacataacggcgcgtctcaggctctaatgacatgattacgcgactgaaacggacagtgcctaataatttatgggcagtaatttgaaaaatatcggtaatatttaattcatcaaatgcttggaaaagagcatcccataatgcaccacgttgcttttcagggatgctgtggttaaagtcgatgaagaaatgccgcaaagaacgtgcacctgaagtaagtccttctgctagaacaaaactatcacggccaacagaccaacggcgtggatcatgttgctggaccatcggtgcagtgcttttgacgattaaaacgtgttcaggatgatcaagcatggtgccaatgattgaagcttctgggaggtaggtcttcatcttgggtaatgcacgtacaaagccaggtgctttccagacttggtggaaaaagccggggccgtcaaagctaaaggccttgataatgcggtcttgcaattttggctcggctacgcttaaagcatattcagcgtaattgccgcccttagaatgccctgctaaataaattttgtcatggggaaaggcggcagccatttctttgagataattggcagcaacatcttgaccataaactttgggcatgtagttcatattcatgtcttcgttccagccgatgattgagttgtcggttccgcggtaaacgatgataattgtattatcgtttaggcgaaaagtagccgcggtaaattgaagtggataaggatccttttccagccgattagtccaattaaggattttgatgtcgcctagacgaggtgatttaggtaaaagaagaatttgatcgccagctaaatctttcatttgaacttgaaatgaaggaaggacgtgtaatttttctgcgacttcacttaaggtatgttccttagcagatttgtcgacgggtaagtagatgattgaggcgaagagggatgcgtccacgctattaaaaggccgttctttaaaagaaagatctccccgccaacgtaaataatcaagtgttccagccataatctcatcctttcattaattaggcaatattactattttactaaattgtcgcgccaaaataaaaatctcaagctaatgcttgagatttaaaatgattttacataccaccacgggtatagctaatgcgagtaatatcaggatatttacgtagattcatgacaatagagttctcatcaatcttattattaatgattccgtcaacgtataaaacaatacggttatcactcacgtcgagaattttaacagtaacattttcgacgtgattatctgctagttcttgcctgattttagacaaaatgtggtgctggttaatagccacaatttgaatgttaaaacgaacatgtggcgttattttgttgataatgacatcatcgtgaaagatcatttgaatgataaacaatagggcggttgataggataccgatgaaatacatgccagcaccaacagccatcccgatggcggcagttgcccaaactccagcggcagtagttaagcctgagacctgttcttttctaactaggattgtacccgcaccaatgaaggaaattcctgtaacgatctgagccgcaattcttgatggatctagtgcaatgtcatgcatgcttaatagatcggtaaatccatatttagatacgatcatgaataaagcagaagcaatcgcaactacgatatgagttctcacacccgcgctttttctctgaatcgcccgctcatagccgattaatgcgccacaaaaagctgcgacaacaattctaagtagccaatctaattcggttgtaattggagctaaagtttgcattatttagtcctcatcctttgtataatcaacaattattatcatttctattttaacgtaaatgcagaaaaattatagtctggggaatttttttgaacttttttcaaaaaaagacttgcacagtttccatctatatggtttaataaatactgttgtcgggtaagacaacgaagagttgctgacttagctcagttggcagagcacctcactagtaatgaggaggtcggaggttcgaaccctctagtcagcattagttaaacaacttacaagtttttaagtctatcatttaagttcgaaagagcttgatatgatagacttttttgttacttataattatttgtgtagatttaaaaatagatatgaatactacgcgtggtgctagttaaatcgttctagacaatatgccatattataagctaaaatagctatttctagccgttgttgaaaacctactaagctcctggctcgattattctcagcattgtaatagctaagcaaagaaaagtcgctttcgattgttcttctaattgccattaactgatgatcattatgctttttagcacccctcatgtttttacgatatggtgtccaaagcacgtatcccatacgctttagcttggctgctaagtcttttcctaaatagccttcatctcctaaaagataatggttaattggatgagcattgatcatcaattctaccgtctcttttgcatcatgtaccgacgccttagtaactgcgtagtcaagcagatagccatcatcactcactattgcgtggactttgaagccataatagtagatttttttcgtcgctttataaccaatatcggctatgccacggaagatcttaacgtgataattgcgaacaggctgacaaactggaatcggaaaactgtcgataatcaataattctccacctacctttacttcctgattccaaccctgacggatacaacgaattagaggcaagagcattcgagctcgacggttaaaacgagaatgagataagccaacgaagaatttacagaatcttcgttgagattcaattccaatttcagtttgccaaatgagcatcgctaagatagaactatcaggaagcttggtctgatcaacatttttacgatgtttaagtccatcaggcgcataaagcttatacagcgagcgacaaatcacatttaaccgattaaaactaacttgtaaatggtgagaaaaacgattaagcttgagatagttcaattagatcagactcttttctatttaaattacttacaacttgagtctagtctaattggacttttttattaactaaaacgatttaactagcaccacgcgtatgaatacttagtttcaccacaaaaaatgccacacagtttttctagtgtggcatttgtgtggcaaaggtactataaatactgtaatgacaggctttattgtttgtcattttttgatttatctgaattatcagatgaaaagaaattttctttagcaaattgtagactctgtataccttgatcaatagctgataaaagttcttttttagtagcttgagtattgattacttttgaagcagttagttcaatgttatgagccatattatcaacttcatcaattaatatattaaagtttctattatctacatctttagaatattgatcttttaatttattaagaactaaattttcaaattctttatttgttgttccaactagggaattgataaagttaagatctttaaatagaaaggagaaatcttttttccaaaattcattgatttcatcaaattgaggaaaatgtgttttttctgctgtcttatcaatatcgccgtctttattacgataaaaattcagaggagtattatagtcacccaaaaatagtaggtagttttttaagtattgatgaaattcatcagtaaagtcagaaacgttaaagtatttattatgtaaaagagatactaatttatgatcaacgtctgatctttgggtgccttttcctgataaatagtattcagaaacattaagcgcatgtgcaagtttactcattgtttggggagatggatagttaacaccactttcatattttgcaattgtgcctctggagatgtttaatcctttttcatttgatagataatcggagagttgggcttgagttttatccattttttctctgatttctttaattctaggtaataccataaaaatcctcccttaaatattcttcataattataacatgctctataaactaaggagctaaaaatatttatttagctattgaaaaggagcaaacaaaatgatataactatttatgtagaaaggagcacaaatataaatagttcatcgttataaggagcaaataatgtatatgctctaaagtgtagaacataaggaggttccacatggcacaagataatacaacaaaacaaggtgaattgctttccacctttaatgagagcaacagtaagagaactccgattcaatcggctttaactcgaccattagaggaagctatcggtaaatgcttcttgttactaagcggaacaacagaagaagtccaagattctaatgattaaagtaaaactattccgcgtgcagtatataaagtacgagttgtaagttctaatacaagactagcaattggtactgtgttaaccgtgaaagttaagggaagcaaaagtgtaattactgatgatgaaaataaaaaatttttgtttggtttagagaaaaataaggtagttgcctttgatgatcttagtcattggaattttaacggaaatgaggggctatctgcgtcaaatattagaattttggaagtcagtcctcaagaagctatgaacttataagggctaggaagtgattttgtgaaaactaagagactagtattagatacaaaaaagccgctaggtaatcctagcgggctaaaaatggcagaaggagtaaccttattgttatcaattgcagttgagtataaggttgcgcctaacttgttaagcacgggcaattacacagctcttgcttatccatttttagtaaatattatacccttagggtatccatgttggaagtggattaatcttcatattattaactataaaatctataagcgattaatgagcatcattcattctgaacaacttatagattatgcagataaaaaagaaacaacaacttttaatgaacgaaaagttgaatatggcgtcaagattatctatgaagaaacatcagaaggtatatacattactgtatatcctaatggcataaagcatagtgatgctacacaaacgctaaatagcaggctagaggagaccttcaacatgaatgtcttatcagtagatcaccaattatcttatacaagatacttgttaagagatattgataagcaacaaatgaaggttatggatgatgtgttttagttttaatattcaactagataaaaatactagttttagtcttaagggctcaggaggtcttctgatagtcggtcgtagtgggtcaggcaaaactaacactacgacttatattatgcttaaggctgtctctcaatgtgattgcggattatacattattgatgctaaaagagctgatatgtatggacttcatcaatttttaaaagatggcaagaaagtagtagcaagtacaacaaatcaaatagcacggctattgcgtgtcattaacgagaatatgagtgcaagatatgagcacttcaaaaatggaaaatggggacaagatttctcagaatatgggtatcgaccttatctattagtcattgatgaagtatcagctatgcttgctgaagctggtaagaataaaaaagagataatgggtgaattacgtcagattattctgcgaggtcgacaggctggaatctttacacttatctctggtcaaagaattgatgcaaccattttagatcgtgatattacattgcaattaggcacacgaatcgttatgggacaagcagactcggaaacttatcgtatggcttatccaatggtgaatgatattaaagcattaccattagttccaaataaaccgggttatggtcttatctattctgatggacaaaagattagcaatcctactccgtttgtgtcacctgatatgtctaatattgatgtacctaaggtaattacccgactggaaaataattatgactcgtctaagtataatgatgagtctgattattggcaattatagttattttagttgccagctgacgggggacggagtcacccgaatggaatgttcaagcgtgagcgggctggcaacacccacttaataatatgggtgtaacggaaagattattaatcatggaaacgatgaataatattaaaattgatcaacttcgtctaaatattccatatgatgaaatctatcaagtagaaaatagtcaaagtttacccaaagaagttatagtagctgataatctgctgcatctggcatggttgtttaagtctaatacagtgagtcatggacataatggctatacttcttcatataatttcggttcaggagaacaaggcggaaatatttccgtaatgtggaacgagtcaagaaaagatatgggaatactagtcgactttactgcgacaggcaaagcgctatatgaaagccttgctgaattacatggaattcctgttaattggaagaaaataattgaagaattatatgaaaaaatggggcatatatcgaggctagatatagctactgaccttattaattatggtttttcagttaacgaaattattcaaaggttaaagaatgaagaatcatttttcttgaatactcaaggaaataaaatcaatgctaatcgatttaagataattggaagctatagtgaagctcagactctatatatcggtagtagaaaaagtgatgcttttctgagaatttatgataaaaaagttgaacaggatcgagccgatggactctatagaaacttggctagaaactgtaacgattggataagagtagaagcagaatttaaacaccgtttagctaaagaactaggaaaatatattacaacattaactgcagataatatttatccttatttacttggctgtgtactagaacgttggtcattagttgatagggaagaataatgacatatgaaaaattccaatattctaaagaatggaagattttaaaagagttatcgaaaggacaaggacttcaagaactaaaacaagctcaagttgacgcttccctgaatagaaaaattaattggttcttgtatggtggtgccagtggagttattacgttgattaaagaaatttatggtgatgaagcactaaaaaagttttatcaatttttagattattttatttctaatcctgatacgttaggacattactaccactcggacaagataaaggcggatactaaaactattgcagattctacgcaaggcttgaactttggagaatatttagaagacttaaagagagaattagttgagggagataaacagaaaggcaggggctaatatgtttggcacagagttactcaacgctagacaaatagcagaagaattaggtattagctatacttacttttttaaattaattaaaaatgggtgtccttatcatcaacttggagaccaaggacgtaaatattacgttttaaaggaagtacaagagtggctattagtaagtagccaacattaattagaagacgtagcaacttgctacgcttttttaggagaaagctatgtcaattacacaaattaaaacggggaaaaataaaggaaaataccgtgttagaattcaacctactgataatgaaacaggtaaaactattccgattcctagtaaagtaacaaaaactagcagtaagcgtgaagcaaaacaattagaagaacaaatgtgggtgcaatatcgcgcgcataaagaaatgaatttaaatgtattagatcaaccacttgcaaaagctttagatcactatgtagaagaagaaagaagttcggggcgttggtcatcgattactacgtatgataattggaaatatacggttaagcttgtttctcaatatttcggaaagaaaaaagttaaagatatcaaagaaaaagatatgcgtagttttgctagaaattacataagtacacataaagcaactgtggcacctcattcaacgctagatagacagttacaaaatttaaggagttattttgctactttgaaggaatatggtgtcttaaagaatcctattcctatgaagccattaactaagttttttagacgtgatgaaatgaatgcccctgttaagaaatatgttttcactaataatgaaattaatgttcttaaagatagaatttatagagagcttggagtaacaagaataagttattggacaactagaattgctatcttgatagctctagatactggaatgagacctcaagaaattcaggctttaaagtggagtcaaattactaatgatggaagttttaaagtttttagaataaatgactcatggaatgaaaaagagaagcatcttaacggacatttgaaaagtcgaccgcatggagaatctagactaacccttcccctttctgaaccacttttgcagttattgaataagtttcgtcattgtcagttagaacttttaaaggagaatggtttaactaattttaatgatcgaattttattgaacatcacagattatcacttgtgcgcattagggtatccaataactcaaaaaagtatgaatgatatgttgaaacagttgagtaagaaagtaggggttaataatcaaaatttaaatataagtatgtatacttgtcgtcatactgtagcaacaaaattagggaatacaccaggcatgtcttacccttgggcggcaagcagattagggcattctttaaagatgtttatgcggacatatgtacatgttgatgaagatcgaaatgaagaaatgcttagattgatagctaaaagataaaagaaaaatgcaaaaataacttatatttgataaaaaaatgaattaatgtagcaatagcaagaatttgaaaataataaataacaaataatttttaacattttatagattttgaaaaaaaaagagcgtatactcagggcatcataaagagatgtgaaggagaaatcaaaatggttattgtagaacaaaagtttaataaatataatcatacaagcaacatggatgctatggagtacgctgcaggatgttgcacatgtacaacaacaagttgtacaacttcatgtgccgctgtagctgaaagttaatggatagttggcgctgtaaattatattacagtgctttttttaggagtataaatactgttatgtgtctattaagaataaaagacttaaaagttaattttaaggatcaaacagtactggattttagaggtcatgatatagagataaagtcaggagacaaagtagctctaattggaaaaaatggggcaggaaaaagtacactattaaattgtcttttacatgaagtaaaatacactggctgtataaaggagaagtatcatcagtcggatataggagtagtttttcaagaaaatgtatattttaaattcttgaaagtttatgaaatctttgaattagtgtggaataaacctaaaaagttaattttaaaatctaaatttattaagaattttaatttagcaagcattatgaataaatacatttctgacttatctggtggtgaaaaacagagattaacaatagctttggttttttctcaaaataaaaagatttacttactagatgaaataaattccggcttagattatgataacaggcatgaattaagtaaaatcataaataatattactgaagaaaaaacagtaatacaaataagtcattattttgaagaagttgaaaattgggctaataaattgataatccttgatagaggcaagatgatatattttggaagcttatctaagttttattctataaataagcatgattcattaattattataaatgataaaaaaagcctatctagactgacccagaagcctttaaatctttatagtaataaatatattgtatctagtagtattgatgagagacatgatataacaaatttattagagcaacaaaagatagattataaagtggtgccacaaaatttatacacaacttataaattagcattagtaaaacatgaggataggtaaaataatggctagagaaattttattaagtttaaaagcacaacttagagttccaattgctgtatttttttctattttttttccaattattatgatgattatgatgatgacatcttacggtaatttttcattaagaaatggatatcactttatagataagtatttttttattagtactactataggtattctacctctaaccttaattagttttcctattgatataaataatttgcttgaaactaagcattacttgcgtttgaaatacttaaatgttgatttaaaaaaattatttttatcaaatattatttcttatttgataattgtatttatttcagttggaataaatttaatgaaactgtcaaatcttttgtgtaaatagatctttctcgtaaattgattttttaattatttatttaatcaaagtaggattctaaggtgtcctgaacctgaccaaagcctttatgaattcgattgaaataacggtcattgtagctcattgcctgaatgccaataaaagcatcaagcgactgttcagttggaaactctgccttaggcttagctttgcgcttgatcacattgttaaatgattcaatcatgttagtcgaataaattgaagctctgatctgcttgggatagttataaaagaccagcagatctggttctatgtctttcaagcttctgataacatggctgtaaaccttgccccatttggtatagaagtcatgcaggacagctgtggcttcttctttgtttgtctgttgatgcacctgtttgaattcgttcatgatcttttcacgatcgtcgacgcgtactttagcgcagatattgcgcatgacatgaaccaaacagcgttgaaaatgagctttaggataagtcctggccaaggctgttttcatgccaacaacaccatcagaaagaaaaagctcaacttgctttaagcctcgggatttcatgttttgaagcatatctgtccagacttcaatgttctcgctaggtgcaatgcagtagtcaatgacctccttgtgcccattaggcttgatgccaatggcaatatagactgcttcacgctcaaatgtttctcggcgcaaaggaaggtatgtcgcatccaaatagacgcagaaaaacttgtcgcttagcttgcgtttgtggtaagcctcaacctttggaatcatctgcttggaaatatttgatacttgggctggactgtaatggctgccatacatcttttcaattagatcggctatttccctggtggtcacgcccttggagtaaagcttgataatcatgctttccaagatatccgagtgctgcttgtagccaggcagcgtgtgctgatgaaattgaccgttgcgatcccgaggcacttgcacttcaattgggccaaattgcgtatcaactttgcggaaataagcaccatttctagagttgccagtattccagccatttctggcatagggatcatagcccagaaaggcagtcaattcagcttctaacaagttattaacagcctgttgtagctctttgcgcaataaatcatttattttgtctggattgaatagagcttgagcaaaatctttggtaaaatcattcatgaaggagttcttctttctgtatgtgtttttttgttcaaaccaatcatacgagaaaggaactcctttttctaatgtttaaagaaataaatttaaggaatcattcatccttacacaaactattttacagtctcaatttaatagtaggaaaaagtatatataatttaagattacctagtatagagtatttatgttatttttttattcaattattctattgtgcgatagttctacttatatttggcttactgttaagtttaatagtatcagatatcaaagctttaatgcctgtaggaatgactataatgtttatattatttatggttataggtgtttttgtacagtatagctccttaccgaaaattatacgtactatttctagctacataccagtaaaatatttggcaaatgatttctattatatctggattggtcaggctaaatggaatatgccattttttaaatgtaatacgatctggcttatttttctgtgtttgatttgttacataatttatagaaggaagaataatgttacgaagattttcaactagtaaggatttaagaattgggatagagataatagttggaatcactttatcatttatcattaattttataatgatttcaattgggtatgccattacaaatagtgaaaaattaaaagaatattcggtcaattattttggattagtcatatataaaataaagaattatggaaataaaggtataccagtttccaataatatgatgtttatcggaatagttttaacaataatatttgtttttattgtagagtgggttgtatataagagggataagaatggtagagtatgagcttaaaggattatttaatcaaaatacgctttcaacatcagatattagtaataataataattacaataatcaacaattatttgatcatattataagaggaaatgctaattctgagatgctgacatacttacttaatatgaaccatcagcgattgaatgattttaagagtatgcatcaatataattatggaaattttgcatccttaatgaacagtgtagaacagtataacgaaatagaaaatgatgaaactattttgctacctaagccattgagaataaaaaataagttacagcaggttctaaagaaaagaaaaagtgttagaaattatataggcttatcatgtgatttacgagaattgtccacaatattgatgtattcatttggaatctcgggaagaaaagagaattttggtggaatagtcgcaagtatgcgatattacgcttctggaggtgctctatatccaatttcagtgattatatatataaataaggtggatggattgaaaaaggggctgtatttatatcagccaatgtatcattccttattaccactaaatattaaaactcaaatcgatattaataaattatttgtaggaagtaacattgatgttaaaaatagtagcttttttgtattttataaatatgcgattagttctacatatttaaaatatggtgagctatctttagctaatattttgattgaagcgggaatgatggcgcaaaatttttccttagtaactacagcatgtggttttgggtcatgtccaattgcaggatataacaaaagatttattgaagatatttgtaatttagatcatgttaatgagcatataatttttactgaaagttgtgggagaaatgaatagcgatacgattttttttgtaaaaaaagatacacatattaattctaatataaacgaatggatattaagtaagggaataattcataaaagcactttaacaataagtaaaaatgaaagtagtactttgtttgtaagtttattcaagcaattaatacaaaatcaggaaattaaagttagtgaagatgatgaagagtattcagacttaaaaaaacttgttcagcttggatttttaggaataagaaataaaaataaaaaagtagcacttattgtggaagaaagtgcaaaaaacttctttgaaaactatttaaaagatgaaaatatatgtgttagctcattagatgagtttataactcaagatacattaaatattttaattgaagaaaaaaataatactaaattaaataaaatagttcaaaactataaaaataaatacaaagatgtagatttgatttttgtttgttctttgtattatgaaaattatttaaaaggaatcaacaagctaactaaattaattagtatcccatataatataggattttatgataataataatatatttgctactagaataatacatggagagactggctgctatcaatgtcttgaaaatcaaatactacaaaaatttgatggatatatcgaagattatgtatcagaaatggattctgaaaaacaagtatttgatataaaaaattatggagtattaatatctataattaagtcagagatagaagaactaaatttatactctgatacagagctacggaaactgtcaaatcttttgtgtaaatagttctttctcgtaaattgattttttaattacttaaacttcccacacgcagaatcgctccttttattgtgattctgcgttttttaacaaatataaaaggcacatgaccttttcattgctataattaaagtgaccaaacgataattctatgcatgaaaggcttgtgccaatgtctattttaccatctcctgaccaaaaaaatgaacaactattttcaaactcaatcatcagcttcatcaagaagtttcaggtgatcaagctgttgagaaaatgtggcttccgcaaggaaaaaggcattagcctgttcagcttgtttctttacgttttaagcaatgtctttcgtgaccgcagcttatatatgcagctgaaaacggatcattttaaagaaagcttttctaaaaattcttattaccgatttatgcgcaacgtccacgtcaattggctccacttcaccacactgctttctgcgcaaatcattaataatcacttgcgatctttgacttcagaaaaacgggctgattgctttgttgtcgatgattcctacttctctaggaccggcttcaagaaaacagaattagtcgccaaagtttttgaccatgtatcaatgacttacaagaaaggttttcgcatgatgaccctgggctggactgatggagcttctttcatgccaatcaattcggtgttgctgtcctctcacaagctacagaatatgattggcgaaaacaaagtctgtgatcagcgcaccattgctggcaaaagacgcatgcttgcccggactaaaggcacagacgtgatggttaatttaatcgaccaagctatgaaagcaggtcatcaagccaagtacgtgctgtttgacagctggttctcaaatccacatcaaatcgtccagctcaagcaaaggaagctggatgtaattgccatggttaaagttagctccaaaatcaaatatgaatttgaaggagaacgcaaaaacatcaaacagatttatcgtagctgtaaaaagcgacgcgggcgttcgcgctatatgttgtcaattccagtcaaggttggccgccaagacaaagacggtgctaaaattgacgctcggataatttgcgttagaaaccgtgccaatcgtaaagagtggctggctattatttgtaccgacatgtcgcttagcgaagatgaagtcattcgcaattatggcaaacgctgggatattgaagtttttttcaaaacctgcaaaagctacctaaaactaagcacggaatatcatggtctgtcctacgatgccttgactgctcatgtggctatagtctttacccgctatatgctcatgtcagtagccaagcgggacgacgaagatgagcgaaccttaggtgagcttttctattgcatgattgatgagctggcggatattacattcagtcattcacttcagctaatcacaaaagcaatggtggctagcgttgaaaaagtctttcatgccagtgaagcacaaatagcagaattcacggctgactttatcaatcgtttacccaaatacatgcaaaaattgttaaagaaaactagcaaaaatagtatagaagcccaaagctaagcaatatcaaagaattgccagcttatttgatgtgggaagtttaagtaattatttatttaatcaaagtaggattctaaggtgtcctgaacctgaccaaagcctttatgaattcgattgaaataacggtcattgtagctcattgcctgaatgccaataaaagcatcaagcgactgttcagttggaaactctgcctttggcttagctttgcgcttgatcacattgttaaatgattcaatcatgttagtcgaataaattgaagctctgatctgcttgggatagttataaaagaccagcagatctggttctatgtctttcaagcttctgataacatggctgtaaaccttgccccatttggtatagaagtcatgcaggacagctgtggcttcttctttgtttgtctgttgatgcacctgtttgaattcgttcatgatcttttcacgatcgtcgacgcgtactttagcgcagatattgcgcatgacatgaaccaaacagcgttgaaaatgagctttaggataagtcctggccaaggctgttttcatgccaacaacaccatcagaaagaaaaagctcaacttgctttaagcctcgggatttcatgttttgaagcatatctgtccagacttcaatgttctcgctaggtgcaatgcagtagtcaatgacctccttgtgcccattaggcttgatgccaatggcaatatagactgcttcacgctcaaatgtttctcggcgcaaaggaaggtatgtcgcatccaaatagacgcagaaaaacttgtcgcttagcttgcgtttgtggtaagcctcaacctttggaatcatctgcttggaaatatttgatacctgagctggactgtaatggctgccatacatcttttcaattagatcggctatttccctggtggtcacgcccttggagtaaagcttgataatcatgctttccaagatatccgagtgctgcttgtagccaggcagcgtgtgctgatgaaattgaccgttgcgatcccggggcacttgcacttcaattgggccaaattgcgtatcaactttgcggaaataagcaccatttctagagttgccagtattccagccatttctggcatagggatcatagcccagaaaggcagtcaattcagcttctaacaagttattaacagcctgttgtagctctttgcgcaataaatcatttattttgtctggattgaatagagcttgagcaaaatctttggtaaaatcattcatgaaggagttcttctttctgtatgtgtttttgtgttcaaaccaatcatacgagaaaggaactcctttttctaatgtttaaagaaataaatttaatgaatcattcatccttacacaaactattttacagtctccagaaaagcctaaaaccgaacaatatttaaatataaagaaacggtaaacaacttcttcaaatataggaaaaaaaactaaaacataaataattgttttattagccttaaaacttaagatattgaatcttttataccttataacatactcaaaaaaataatacgtaaaaggaataatcaatattaagatgatttcaatatacctattaaaattgatctttaaaataatggtatttacaatagctacaattaccaaggttattaaatatactgtcatgctttttctatggctggacaatattcttcttattatcaaatatattccgcctggaaacaaagtgatgaaaaaagctattttaagccaaaggatgggggacattattaataatacctcctattttactgtatcttggatgataataaggcggataagacggtaaagaaattggtaaaagctctggtataaatactctacatatttcaaagttttgatttctaaattctggaggcgtaatatttaaatatcctgcatacttagagatgctctttaaattcaaaagcaaatcttttaaattagtaacctttttggacactcttaaaatattctcttttttgattaatttaggctttccatttttagcataaaacaatacattatcgtctaaattatttacatttaaatcatctatatttgtagaaatctttttaaatttagaaccttcaacccaactttgagtaaaacaatattctaaaacagttacacattcaaaaaaggatcgttcaatacacttatttaaacaaaatcctccttgaactcctactacatatttaggtagtttactatcactattactggtaatttcgcaaacaactacattaattgctttgtcaaaactaatatctataaaattaaccgtaaatttttttaaaaacatccaaagtctattattgtttgggaacaattcctttaataagccttctgtatcaatatttaaatttttacctcttagacctccataccaccaaagattaaaagaatctatttgtaagaactcaactatggcattttccagacttttatcaaagctttcttgcgaagcagttcctgttgatgtagcactatttacaattcttttttcatttttaaatatactgttggtatacataatataaaactgaagcggaactagtacctttttattaatatcaaatagtgaatttaatgctatccatcttatgatacaatcccactaaagtggacgattgaaatacataaagtattcaattatccatggaggtgggattttttatgtccagaaaaagtaaatattcattcgatcaaaagatatgggcagttgaacaatacttgaatggtaataggagcagcgttgaaatagctaaacggcttaagatgccaagtaaaagtggagcgatgcaagtaagaagatgggttcatcaatatcaaagcaatcgtgatacccttctaagtaatgctcaatacaataatcattactctaaggcatttaaagaaaaggttgttcaagaatatttagctggcaaaatgtcgttaccttctttagctaataaatatggcattagaagcaatggaacagtatcagaatgggtttccaagtataatagtcatatagaaaatcgggactatgatccccatccggaggtctatatgactaaagcaagaagaaaaactacccagcaagaaagaattcagattgttcaatactgtcttaatcacgacaagaattacactcaaacagctgtcaaatttgattgttcttaccagcaggtttacagctggacacacaaatatctagctaatggtgaaacaggattaacagataaacgaggcagacataagaagccagaagagctaactgagttagaactggctaatcgaaaaattaaggaattagagcgtcagctcaaagaagaacaaactaagaacgaattcctaaaaaaattagatcagttagaaaggatgtgcttgccggacaaccaagatacagacaagccgcaataaaaagacgctggaaacaagaaacatatcagttaatccatgactgccatcaaaagtacaattggaagattgatttaatgtgcaaatgggctaaaatagcacgctcagcttattacaaatactttgatcctaagcgcaagccgagtaagcgtgaagaacgagacaaaaagattgaagcaaagatcattgaaataaccaagtctaacaacagtctgtttgggacggaaaagatgaccatggcagttaatcgacagatgtctgatgaaaagccggtttatcataaaactgtttaccgcttgatgtgtatcaatggcattagatcacaaaagcctagataccagaagctaaagttcaagcatacaacgcctgagaaaacggccgaaaacaagttaaaaagagactttaatgcatctagacctaatgaaaaatggtgtacagatatcactgaagtcgttgctgctaacctgcctaaggcatatctatgtactgtgtttgatctatatgatcgctatcctgttggctacgcaattagtaaacgaaacgatactgctttagttcaagcagcctataagcaggctgttaaagcataccctaatgctcatccgcttttccatagtgatcgtggttttcaatttactcgcgcacctttccaaaaccaattaaaagaccaaggcatgacgcaatcaatgtctcgtgttggctgctgtattgataatggtccaatggaaggctggcaaggcattatcaaagaaatgcgagttattcttcatcctcaagtggccagttatgatgaacttaatgattctatttgtaagacaatagattactacattaatgaagatccacagaaacgttttaacggtttaactgctggtgaaaggcgcaaagaagcgatgaaaggcaatattaagaattgccctattgcaccaaatcatcgaattgagaaatactggcaaaaaatacacgaaaagaaaataagagaagccaaaaaatcctcagctgattattaatcaactgaggaataaaagctttatgtaattctactgtctacttgacagggaatgtatcattattggatcttttttagttatataattttctttatcttcttttgaaaaataaatattaatataatttaaaggtactatataacaattagaatactttttctgaagattttgataatcagaataaatgatattatgcttaatgttttgatataagactgaaaaagaatatctttctgtactttcacctagaaaagccgataaagctttattataagataagccgtagccactaagatgataattaatcgggggaacatagccaggaaaagcgaatttttcaaaattagtaaagtttgcagtaatataattataattcattaccggatacgaactttcgccaataaagaaagtatcctttttccagattccagttatagcgccacccaagatccgttgacgcaataaattatattctaaattattcttgatatttatcattacctaaaacctcggctaaaatattgcacgctttcatattttgttctttaaataaaatattatttatagtagaacaaactgagcaatcactttgaattctattcttatcaaaattgtattcataagtaggtaaataaaaatgaagaacatttcctcgtagctcgagactgtaaaatagtttgtgtaaggatgaatatttccttaattttatttccctgaatattagaaaaaggaatccttttcccgtatgattgatttgaacgaaaaacatactagaaaagagattccttcatgaatgattttaccaaaaatatgacacaagctctattcaatcaagacaaaataaacgatttattgcgtaaagaactccaacaagcagttaatgatctattagaagctgaattaaccgcatttttaggttatgatccttatgatagagctggttggaataccggtaattctcgcaatggtgcttatttccgtaaagttgatacacaatttggcgagattgaaattcaggtgcctagggaccgcaacggcatgtttcatcagcacacgctgcctgactacaagcagcactcggatatcttggaaagcatgattatcaagctttactccaagggcgtgaccaccagggaaatagccgatctaattgaaaagatgtatggcagccattacagtccagctcaggtatcaaatatttccaagcagatgattccaaaggttgaggcttaccacaaacgcaagctaagcgacaagtttttctgcgtctatttggatgcgacataccttcctttgcgccgagaaacatttgagcgtgaagcagtctatattgccattggcatcaagcctaatgggcacaaggaggtcattgactactgcattgcacctagcgagaacattgaagtctggacagatatgcttcaaaacatgaaatcccgaggcttaaagcaagttgagctttttctttctgatggtgttgttggcatgaaaacagccttggccaggacttatcctaaagctcattttcaacgctgtttggttcatgtcatgcgcaatatctgcgctaaagtacgcgtcgacgatcgtgaaaagatcatgaacgaattcaaacaggtgcatcaacagacaaacaaagaagaagccacagctgtcctgcatgacttctataccaaatggggcaaggtttacagccatgttatcagaagcttgaaagacatagaaccagatctgctggtcttttataactatcccaagcagatcagagcttcaatttattcgactaacatgattgaatcatttaacaatgtgatcaagcgcaaagctaagcctaaggcagagtttccaactgaacagtcgcttgatgcttttattggcattcaggcaatgagctacaatgaccgttatttcaatcgaattcataaaggctttggtcaggttcaggacaccttagaatcctactttgattaaataaaagattaaaaaatcaatctacgagaaaaatctatttacacaaaagatttgacagtttctctttattgtttaaaaataaattctttaaatataaagcagcaatcttataaagcaaaaaatgtatggttggttttgattccatgatgtagtcaattatttttggaacatgcattaattgaagtgattttttagaaagttttctattatagcaaaccgctagataattctcgaagacacgcaagtatctttcttgttctaattcggagatatttttattgcttttcatctcgttaagtagtctattgataaaaaatgcaagggtatcttgttcccagagcggcattgtattagtaaaaagtcgcagtaattcaggattagtcatccagttttgtccttcgttaaattcaatgaatagatctttttttattttgggatcgatttgatttaatttattttttaaatatgctacagaaatcatagctcttaattttaaaatcttagagtgagattgtgacagaatttcttgatagcatgattcaatttcatcaatttttcctacattgaaggcttgttccattttattatttaaatctgattcaatctttttttgctttgaagtataggttgctcgcaataattggtaaaagtaagtaatatcaacatcatgttcaaaaagaatcgcggctaatttatctgcactaattctgctttttcccgcttctactttcgcataaaaaggccgagtaacaatgttagcagccatttctttttgagtgaggtctagattttgtctaatttttcgtagtgcttgtccaatagtcataaaaaatcctttactctaaaatattttcttctctacgatatatgattattataaatgatgaaaatataagcggataaattaaagagaactatggatatcggaacggcattaagacatttgagagatgatctaggtttgacacaaaagcaaatgattcaggggacgaaaataactgttagtcactattctaaattagagaagggacaaaacaggatatttatcgaaaacctagtcgagatattgaagcaacgaaatatttctttatcatattttgttgatcactatcttaatgatgaaaatagtgaaaaagaagtaaattattcagaaatattaaatattgctttttacgaaaaagataagatcgctgctgaagaaataaaacgacaaattttttcagataagagttctagcaatgaattgagagatagagcaacattaattgtggatatgatagacaaccagggacagagtaatgttgatgctcgaatcattaattctattttcaaacatgacaactggactcagtatgacgaggcaataatattattgggtaatattattagaactagtaatgtattaaatatgagtcctttggtattgactctaattagaaaatataaagatctagataaagaaaaaatcgaaaaacaaagaaggttagcaacggttggaattaattatttatttaattttcgaaagttaagtaaagagtttaataaaactgtgctaaaaattataagctggattaaaacaacatcgattgttcctgagttaggcattattcgagaattaaatgcatattttttagcagtttatgaaggaaacatttctgtctcaactaatatcaaaaatgtccttaaaatatcaggttatcaaaatcttgctaatgatttacctaattaatcccctgagaggggattgagttgctgtggaatgagaagtagataaaatcatagttaattaaatatgaaagagaggcatagtaatttgattattgttagttatccagttttacctgaataactctgagttcatacagtacgaggagatataaattatgaaaaaaagattttgttaagcctaagtttagtagtattaggaaatactttgttttttaattcgagtgtagcttctgcagcgactaataatagatattccgtaaataatacaattcgtcaggcacctaatactggcgatgttcctggtggatggggcattactcctggtcatacacattggggctaagtgatagaagcgatgaatgaattttcattgctctttttattttgggatgcgaattttatgaagaaaagtaaaatcatatttttaatagagcttgtattaaatattattgctgctgtttttctagtaataaataattcattcaaaaatttattagatgtaggcgttgtatttttactacttctattgcttatttggaattttttaagaagaaaaattgagattagtttaaaactatcatggctcaatcttatgatattaccagcaatttttacttattgcttaaatactgtagctaatgttttattggtaaaatatcctgttaaaagtgttttaatagctataatttatagtttgttattcttagtttatttgcttccggtagtaattactaatgtgggattggttaagaataagtatgctagagtttttattgcaatgtattatattgtgctattactttttagcgaaaacttacatatgaatgactacttatcatcctttgtaaattggtctcactctgaaattcttaatgggttagcgttaattccaatcatattttgcttatttaaaagttgggatattcgagcaaagcttaatcttaaatttaggcgatattcaaatatacagttaatagttttattagtagctgtattctttgctgcttggtattccttctttcatagctatgtttatattgcaccaactttttcgcaattattttggaattgggacttctcggaaattatcccaactgaacgagctgttttatggagtttaggagcgattttattcgaagaaggattccggtatctattaataattgtattgcttgaagtttttaaagtgcaaaggggtcaaattgactattttcttgagtgcgctattttttggattgatacattatgccggactacttgaccaaggcccaatatttataatttcaacgcaagcaatttttgcttttggttatggctgctttttggcgacactgtacttatattctggaaaattctggttagtattgctttcacatttttcattagatcttattgcattctcgctttctgcaggtggtggcggaatactatcatggtatggcaataatgatctcttgagtaatggtttgagcatggtttttgctttagttatgacattgattatgtttttaggtaaacaaaggaaaattatgcaagaaaatgctgctagattaattaatgcatgatgcatttaagatggtcgaaagatcatcttttttatgcaataaagtgtcatatataattgacacctactataaaagttgctattattttaaaaacgtcacatataaatgacatctaactagatgaataaagaagaattcaatgaatcgagtaagagaatatcgtaagcaaaagcaaatatcacaaatggagcttgctagacgaataggggtggcaaggcaaaccattaatttgattgagaatgataagtataatccatcgttagaattatgcctaaacttggcgcatgcattaggaacggatttgaatactttgttttgggatggggatgaagcaaaatgagacgagaaagtttatggcttaagtttgtcagatattggtatggcattgatagtaaattagacgagcggcaattagcagaggttgaacgaatcggtaataatgcctatgtaatctctggtatagtggaactgatcttactggttatcacgctaattatggcattgactattaaaagtgagctggctttgtggtttttacctttggcgattgcaattatgatgctgatgatgagtgcttatacttatttgacaatgcgaaaatttaaaatattctctgtcgaaattacagcagatgaacgccccaaagcaattcgtagaatatggataaaggctataatagcgggaataattggtgcagtttttggtacattaggtagcgcgctaggagcttcttctgtgcaaaataatctagtaaatgtgcttgatttttggccacaaggtttatggctaggcgtatgttgcggtgctggtagtgcgattggaagagtgcaacgattgaaagtaattaaagaagacgaataagcgaatcgaaagtagtcgatccgctttttttgctgaaaaactatataattaaagtaacaataaaatttacagcaaggcaaaaaggatgaaaaaacaaaataagactggctcaattggcgtagtgggtgccacggccatcggtgttggtggcatgatgggagcaggcctatatacattgctcggcttggccgccaactctgctggtgtttggctgccagtatcatttctaattggaggcattgtggccgcattttcagtttattcgtattcaaagttaggaatgaagtatccagatcgaggcggtgccgctaagtttttgctaaaagaattcggagatggcctgctagctggtgggatgaacgtcttccagtatatcggctggattatcgccatggcgttatatgcgaccggatttgcggaatatgcctgccaactattgggaaaatcaagctcaggctggctaggtaaggcaatcagtatcggaattgtcatcgtggttgtggcaattaatattatgggttcaaagcaagtggcacgtgcgcaaacggcaattattgcgtttgaattgttaatcttactgtcttttgtagcggtaggtttaactaagctgcatgtgccgacaattactagttcaaatagcggcaatattgtaggtatcctatctgctgcgggtttactttacgtaacttatgaaggttttggcgtagttactaacgctgcagggagtatggtaaatcctaaaaagcagttgccacaagcgctgttcttttcattagggatcgtcatggtgatttacattgtagctagtgtagtcgtggtgatgaccttaggcgttcaaggcgcagtagctaatcaaggccacgttttggcaacggctggtaagctagtattaggcaactggggtctgttcatcacttcactgattgtctgcatcttcgttgtgattttcccattatcagctgttggtgagatggccagcctagcctttttattggtgtatgccatggttaacttaggccacttgcgcattgcaggacaaactggggccaagcgctggattttgatttgctctgttgtattgaatctagctttgtttgctttgttgtttattcagacaattctcaaccacgaaactttaacttggatttcagtaattgctttgttaattattagttttttagttgaacttgcttggcgaaaaaagaataaacgcaacctgcattgattaggaaaaaaatagtaatttatgatacaaaaagtcgacttttgttccacttattgggtacaaaagtcggctttttgtttttttcgttgtcaaaacaatatctttaatattttaattcagatatactctctttgatcaagtttgaagtgagggaaaatgaatgaaaaagttattgatcggaagcgcagtcttagctgccttattaattaaagaaaatatcgcagtaaatgcggcaatagagcaaaacgaaacaacgcctaagattgcagttactgacaaaaaagagaagccaaaagaccagtctgataatagttttgcaggtcattatgaccaagagacaaattttattacctgggaaataaggctgaatcccaagaaagaaaaatatactggtgatttgaagttggaaaatttaattccagaaggcttagttctagatccagatacgattgaagtaattaagaatgataattttattcaaaattctagtttagttaaattgaagaaaaacaaattaacagctgaatttcctgctaagaagtattcagagagcacaattttgattaagtatcgaaccaaggtggaagcagagcctaatgagcctaattatcttcgggtgagtcagtcctttactttgggcgatgatcgagttcaagaatacgagcaagaaattaaatacgatcgaagtaataagaattttaacattgaagcgccacataaatctacgtttagagatgataatcaaatttcgttaattaaaaaatctaaaagtaatgaagaacgctctgaagattggcttaaacgtctagcagagctgattattaataaaaaagaaactacttcagataaaggaggtgaaaaagttcaaggacaggtcaaagatcaaaagcagcaagcttccccagaaaatacaaacctttcacgcactccaactgtcaaaggcttgactggttttgatactaaggctaacgaggtaaaatccacagctaaaatagattctgattcagtaaaaactactctagataaagacgagattaaggacaatgcaagtactatctcgcctaagtcgcaaaaacacgatactcatgtcacactccctaaaagtgacacatcagaaactaaggcaaaattacctaaagctggtgaaactgccggtgttatgctcagcgtattgggcataattttaataattgcagggtggacagttcgaacaaaattcttaaaataatctatatttgtactaaaatacggattttcaatagccaaaatagactctttcacgtattatttagatagataaacttgtatcatgaaagagaaacaaacatgccgtacactatttcagaaattattgttttattttttacttattcagttatcggctggctttgggaaaccttttattgttcgatcaaagaccaccattatgattatcggggatttctgtttggtccttactgccccgtatatgggttcgccgttactacaattttaatttgtaccaaagacgtgcgagataacctgctccttttatttatagtagggactatcgttgccactattttcgaatttgtggctagttggctattagagacaatctttcacatgaagctttggaattattcaaaattatggggtaacattcaaggtcgagtggccccaatgatttcattattttggggcgttggtgtagttttattagtaaaatttattcagccaatcattcagaagctcattaataatgaagaaaagataactcatggctggctagctgtgggtattaccattgttatgggtattgacttagtattaacagtaatcagtgtcgagagattccatactacaactaagatgtgggatgtgcatattaaccactttattgagcgagttagaactaaagtagaaagtcatatgcctgagaaaggaaaattgcgggttggtgattggcaccactcagtgatgcagcactatgatgaattacaaccgcaacgattaagctggaatcataagcgctacttgaagagctttccaaaattaaaagttactgatgctcctaagttcatggaaattaagaaagaagtcttgaagaaagaaagctaactaacataatcttattttgtgggattgaaaaaagtcggatgatcatattaggtcatccgactttttcttatccattaattctatttggttcacgttttttactttttatttcggtgtagttatctaaaacgttggcatagcgtccaagggtgaaaaggtaatcagataatcgattgaggtattttaatacgtcatctgataattcctgttcatttaaacttaatttgaccaatataatagcaacaccatcaactcctgaaactactgaagaagaacatctgacagtaaaagatcatgtgggttcatcaactttaagaagaggattaccacaaactggtgaaaagaaatctactttgaatgcaggctttgcccttgctggcataggcttggctttgcttgcagggatgttgtttgatcctaaaaagaagcactaatactgaataagaattaagttcgttaaagatcgaatcattttgggttcgatcttttttagtaacaaaatttaaaaaatcccaccttcgtgaataattgaatactttatatatttcaatcgtccactttagtgggattgtattaattcaggatgatctttttgaatttcctgtttttgaagggcagaccaagtccatggaagagttttttagtcgcctagaaactataggcaaggcttggcataaagcctatgataccattgattccgatacagatagagtcattaagagaactaaaatggatgctcgtactacgttagacctactagaacatctatcacctgtacagttctcttgaagagaaaaaagaatatcagcacgtcaccagtatggttcttagactatgatcaaaaaatttattgtactgatgatgccatcattggtcagatgcttcaaaccattaatcatgacattacccgacgcagcagtcgtagcttattacactggaaaattcttaaacaaaattgttccagaaatttttatttttgatggatgttattttttgcttggttctaagcgattttatttatcaaagttaatagttctatgttatattataagtgttataataatgtaaaaattattaagcattgaaatatagtgcattatgatacgaggagaaagatcatgttagaaagagtcccaaaatatacactaagaaaactgtcagttggcttggcctcagtgatgattggatcaggaatactgatgaactctccaaaggtacttgctgatactattaacccaaatgaaggtactagtactgctgttcaaccttctagtcaagataaagataatagtgagccaagtactcaatctggtgctactcaagatgaaaacattgattctaacgcagctgttcaagagagaagcgacaactcagttactgaaccagcaaccacaactaatgctgaagaaaaagtagtggcaacaaatacccaagatactacgcaagataaagacaagcagacaaatgcgaatgaaactacgcaaaatactaccaatgtcgacaaaaaagatactgaagtaacgccgactaacgacgcaacaacagctacaccgaagacaaccgccaaggttaacgcaccggctgcaccaacagcaatgaaggcagcagctactgctgaaacaccagatccaacggttccagataactcagctaatactgctattatcaatgacaagaatagtttggaaaaaatttggcttgaaacatctactgcgcgggcccaggtctacactaccgttaagggaactgatcaaaaagtctatgtcagttcctatgcagaattcggtaagcgacttaattcattaatttttactaatcgctttgatccaaatagtctagaattacacattgaatatcaggtgttaaaggatagggttcaaaatttcattgtaaattggggagactggctccgactagataccagtagaattggtaaagatggtctaactttcactacagatacaggtgaaaaagtagcctatacgttaacaccaggatggggggaagtacaaaacctatgatgaatggcttagtgaaggccaagatatgagtaagataaatgctcttaaaattggcaacaatttaaaggccgggactaacttcgtattaaccgttcccctaaaatatattggtagaactgatggcacaaagcaatttaacaatgttcaagttgtagattacgggcagccaaatgctaatatggtgttcgattttattgaattacatccagagcaaatcgatactccagaagctccaactactgataaagagtcagttactaccggtatctataacaatccgttagctactgctacagactggtataaaacggagcatggtgaatatgttgcatactatacagctaaagggaaagatggtaagacctatgtaactggatatgtggctgccaatggtaagtctgagtcgattatcaatgttgatcagattgatctaaataccttggaataccatatgatttaccgtaatggtgacgaagaagtagcggccggtatttcagcaagctttgctgatggtaagactctagtggttgatgctagtcgtataggtgctgatggtatccgtttgaagagtcaacagggttggtcttataacaacgggggttatagagagaatactagtgggagactctattatagttgggaagattttcttaagaaccataacggatcggtagataacctcgttgacatcaatatgaatgcatccgctttcaagccgggcgatacaattgaagtagttgttcctgttaggtatattgggaaactttctgatcaagttcaatccttagaatttaaatctgaagctagaaaagatgtttcggttaaactctacttcacaactgtgcgcaaggacttaagccaggttaagcaggtagtcttgcttccgactgagttcatgggagaacaacctggtcaatcaaactggaagctggttaaggaaattgaaaaagatatgccaaatgggtgggaggccattaaaattagtaacttcccaacctataagggatcattcaatatggattcactaccaaaaggggacttaccatcggttgtttatggctctgcgcaatactttgttgacctccaagaaattcagaaaatttttgctaaccatggttacacggtcaagtatgctaacaacaacggtaaagctcaggaaatgccattctatggatacgttaccctgccactggcccttattgatggtggtggtaaacctgttgccccatctatctggacaatccaagttcaagctgtgcctgctattattttaaataaagatcaacactatgtggcagatccgaatgctaagccatgggacaccacttcaatgattgatgagatttatgctgctgatgacgcaggacagcggaagacgcgcgatcaactagaaaagttgccaaagacggacgtggatattagttatgaataccaagctccaggggctgctacagctgctccggttgataaggtcgacttgactaaggcgggggtatacactgtcacttacagtcatacttatgctgatgggcgagtagttaaggatagtcgcaaggtttatgttgatgatgttaagcaagaaaccaaggacattactcgaacaattattgtccacgagccaaacggaactgaccaaacagttatccaaaaagcaacattgacacggaaagtaattcttgatgcaactactggggaaatcaaatctgtgggtggatggtctactgctaagtgggaaagatactcagctccagaatttaaaggttacactccagccccggctcaaattgatgaaactgctgtgaacaaggacactcaggatacaactgttgagattagctatacagctaatgagatcacaaagccagaaaccaaggacattactcgaacaattattgtccacgagccaaacggaactgaccaaaaagttatccaaaaagcaacattgacacgggaagtgattctttatgcacctactgggaaaatcaaatctgtgggtgaatggtctactgctaagtgggaaagatactcagctccagaatttgaagattacactccagccccagctcaaattgatgaaactgctgtgaacaaggacactcaggatacaactgttgagattagctatacagctaatgagatcacaaagccagaaaccaaggacattactcgaacaattattgtccacacgccaagcggaactgaccaaaaagttatccaaaaagcaacattgacacgggaagtgattctttatgcacctactgggaaaatcaaatctgtgggtgaatggtctactgctaagtgggaaagatactcagctccagaatttaaaggttacactccagccccagctcaaattgatgaaactactgtgaacgagaacactcaggatacaactgttgagattagctatacagctaatgagaccccagagcaaccagataacagcaaggacaaaggtaataatgacaacaatggtggtaacaattcagatgcgattgtgccaataaatcctagtgacaataactcaaataattcaaataatgcaccaactgacaataagaagactgatgacaccaagaaagataatactggcaagaagattacaaaggagactcctaagaaggtaaagaataataagtctaacaagaccaaatcaacgactacttctaaatctaaccagtcttcaaaggctaagcgaaccactaaatctggtacgattagtcctaaggcagtcgctttagctaatactactgctggtctagctacttcagctaaggcaaatatggaaaacggtattgccaagaacaacagccaaaattctcaaactttgccacagactggtgaaaatgaaagtaaggtagcatttgccgttgccgggttgttagcagctgctttgggcatttttggtatagctattaatcataaaaaagaaaattaattagctaagttgaataaatcatacaaaaagacgcatagaatagcaatgtcattaagttaagacattgacgaaaatcagactttatgaaccgaattattttggctctttgtcaaacaccctaaagtataaaggtagatagaaacatgacgatgtttttatctaccttttttcttatacttagattgagcttgcggttgaacccttcaaggcagccgttagaataaggcagttttgctccattaagcacagcttttaggttatgtttaaaggtcaatagtgttttgtgcattaaagtcccaatttgatcttggcagttgattaataagttgagctcatgagtattgcccgtttcaacggcttgaataaagctttgcatcaggttatatgaattctctaaggtagtgctggtattgatgccttctgtaactacttgtgcttgagttaagcagtctttgtagtgccagttatagtgaggatgaactttttcaagttcatcaaacttcttcaagtataatttccaaggagacttaagcagctgatattgccgcgatcttttatcaaaggtcttcatgacttggaccctcagcgagttgaatgagcgcgtaagcatttgaatcatgtgaaaacgatcaatgacaatctgtgcattaggaaaacaagctctaacgatatcttgatagtaaaaattaagatccatcgtgaccgttttaacgttagctctagcttggagcgagaaacgaccaaaatacttaagcagcgtcttcttgtagcgagttctaagaatctgaacgacttgatgattatcaccatccaggcagataaagtgcagctggcggtaactcatcaaaagctaaatgagctggcaaatattcgtagctgtcaataaaccggtgtgaacagttgcccagtactctttgaacagtattaattgaaatattgttttctctggcaatgctggtcatagatcgatcttcagttaaagctgacaacactttaagcttagaggcattagaaatagaacagtatttaccaattcagactgagccatagatcagcgctcacaagtgcgacatttaactcgttgcttagctaatcttataatgaccggtaagcttgcattagctgtcggatagtgaatgttggtaatcaaatggccattatgtaagagatctagggagccgcagaaaggacaagcaggttgaagcaattcagcttcatagattttatgcttttgcagtttgatcgatttatagaaatcacctttatttataagaatttgtgtggaaacgatttttattgaagaggactatgtcctcttttttgcaataaaaaatcctgttaacagcttatcatatagataagtcatcaacaggaaaaattatagagccaatattttgagattaattgataggggttgaaaagtaaattttatttgttatagaaaatatagaaaaaggattgttcaagaaattattttacgaaacctgcagtgaaccaagtgttggcactaggcttaagtgaccagccagtgaccttcttgttaacagcagtgattgagtattggttggtagttggcacaacgtatgcttcatcatacatccacttttgccacttcttgaaggcattagcacggtaagtaggattgaaggccttctctgagtcgatatcagccaaaagcttagtttgcttaggtgaaacgaaacgagcaaagttgtatggtgcagcttcattgtaaaggtcgttaggggatggttcacttgaaagtgaccaaccaccttcgaagacgtcgattcttggatcgtcagattgaacagcttgtacccagttgttgaattccattggacggccgccgacaaatttaacatccaaaccaactttcttccattgttggatgtagtttctccaaacaggttcagcggtagttgagttgtttctaacagccaagttaattactaacttcttgccgttaggttgaactctgtattcacccttcttcttgtagccggctttatccaataattcgttagccttcttcaagttgtatgggtaacccttgattgacttgtcagtataatcaccaaattgttcagggatcaaagtgttaacgcggaaggccaagccgtggtagtaacgtttagcgactgcatcaacgttcattgcataagccattgccttacgcaatgatggattgtccatcttggagttcttgttttcaacgttcttgccagacttcttatcccatttacctaccttaaagcctaagtagttgtaggataggggaaccttaccaatgaagttggtatcagtagcgttcttaacatcatcccattgggtgttaactacgccagctatgtcgaacttgtgactcttgatggcttgagtaactgagttggtaccgatgactgtcatggataccttttccaagtttggtgtaccacgccagtaatgcgggttacgttcccaagtgacagattgaccacgaacaagcttgcttacgcggaatgggccgtagaagagtggttgttttctaaccttgtcactagacatcaacttggagaatggtacgtcctttaagtaatggtaaggttcagcgtattcctagaagtaaccgttacctgattgaagcataccaggcttcatttgtttaaagtgaattacgaccttgcggccatcttcgccatcaggcatctcaataccagaaatcttcttgctcttgccttcgtgatattctgctaaaccaacaatgtcggcaagagaatcggtataacgttgtgacttggagtctttattagcgataatttcataagcgtattccacgtctttagcattaacttgcttgccgtctgaccacttaacacccttcttaacctcgatagttacggtcttggctttacggtcaagcttaaaggtagcagcacctttattgttaatcttgtattgatcgttgactgagaataacccttcttgtcctggctctgcaacttcactgtcagtggcagtatcagataattctggcaagaaaataccagtgaagggactatcagattcgatagcataatttaaagtgccaccttttttaacacttttcacaggaacagtttgactgaatttgtgatgtgtttcatctgcattattattttttgaatttttattattaccacaggcaaccaaacttaaagctgccccagaaacaagtgctaatgcaccaaaatatcgttttgctttactcattcaaaaagcacctccaaataaattaaaaatatttgagttttattctatgatattaaaatgaaaaaaaaaacaatagaaagatgaataaaaatgtgaaaaatattatttttaaattatttttgaagctaagattagttttctttcttggctaattaggcatagaataaggaaataacagctttttatgttggaggaaaatatggatacagcctggcaaaaatttaaaaataatattccattacgtcgatttgtggtactgctattaattattgcctgcctttatgaaatacgagcaatgatgaacacagtattattaacttttatttttacttatgtgatcgtgcatttaattcatctagtgcagcggtattttcctaaaataccaacaggcctaattgttgcggtaacatatctaattatcttggcgctactttatttcgtggttaccatttatttgcccatgttagttggccaaatatctaaaatggtaaagtcagtgatggcgttttatgaatcaaatgaatcatcgcgcttagccagccatgtaacgcgttatatcagtaaaggtgagattgttacgcaggcaaaacgagttgggacttttgctctgcatacggtgaccaattttggtagtttaacaattgctacctttatgtcattgattttgagtttcttctatacgattgaattagatagaatgattgaattttcaaagttatttgttaaaagtggttactttaaatggctttttgaggatattcgctattttggtaaaaagtttaccaatacttttggtgtcgttttagaggcgcaattctttattgccatttgtaatacggccttgacgatgattggtctggcatttatgcatatgccgcaaattattgccttaggcttaatggtctttattttaagtttagtgccagtagctggtgtgatcatttctttaattccattaagtattatcggctattctgttggtggcattcgttatgtgatttatatcttcattatgatcatgattattcatgcaattgaggcctatgtgttgaatcccaaatttatggctagcaagactgaattaccaattttctatacttttttagttttgttagtagctgaacacttctggggtacttggggcttgattgttggtgtaccgatcttcactttcttgcttgatgtcttagggattaaatcggcgaagaaaagtaaaaagaaagcgaataaataatgagagtacttttgacaggtgatagcattattgcacgccaggaaggaaaaaatgaaccgcatcttaattggaatttgcaccaattattgccagatattgaaatagaaaataccgctgtttcggggattaactccggggccttttttgccaaattaaatgaattagtactaagcgtaaagcagtgcgataatttggtgatcttgctgggaaccaatgatttggctatgcacaaacaagtgccagcaaggcaatttaagcaaaatatggaaattatttcctcggcaataatttgtcaatattacccaccacatgttctgcttgtttcgccgccagctgttgatgaagctaagcaacgtgtacggaataatacgttagtagcggaatatgctcagatcgtgaaagaagtagcacatgagtatcattttcgttatgcagatctggcacaagctatgcgggatactggcgatttaagcgagatttgtcaaggagtaaaaaacgatggacttcattttggtgatcgtggctatgagattttaggaaaactaattgctgaaaatttgaaacaaatgtaaaaaggaccgcaatttgcggtcctttatttttcgctattttaatgttgcccaaagcaagcttccagctagcgcaatggccaagaacggaatgagcaaataggcaaaaaagaaaaacataattcctacgactagtaaaaagccgataattttaatgaggccaattcctaatttaaagaatagccagagtaagagtaatgttaataataaagaaagcatattaatacctccataaatctatgagagtattttactaccaaattggacgaatagaatagtaggaagattaatgctttagaaaaatttagttaccggtaacaagataaattatattgaaagctctttctgtaaccgctatattttaactattgaaagcgatttaagaaacgagaggaaaaataaatggaggagaaaaaaactgggttacctacgctagctagtacgacaatttggatgattagtttggggtatttgggtgtgcaaatcgcctttactttggaaacatcacagatgagtcgaatcttccaaacattgggtgctgatccgacaaaattaggctggttctttattttaccgccgttagctggattggtagtgcaacctggaattggatcattatccgatcgaacttggattcctaagattggacggcgtttgccatatttattagtcggtatgatctttgccgtaattactatgattttgttaccaaatgttggtagttttggtctaggctatggttcaattgaggctctaatatttggtgctgttgcaatcgcgatattagacgtggcatcgaacatggcaatgcaaccatttaaaatgatgattggtgacatggtcaatgatgaacaaaagtcatatgcctatgggattcaaagcatgttgtccaactttggtgctgttattgccgcatttttcccgttcttattaactagtttgggtgttgctaatactgctaaaaagggtgtggtaccacaatcagtaattatttcattttatgttggtgctgccgttttagtcattacatcattgttcacgatattcagagtacatgaatatgatccagaaacctacgctcgttatcatggaattaaagaatctgataatcaagaaggcggtggttggattgaactgcttaagaaggcgccaaaagtcttctggcaagtgtcattagttcagttcttctgctggatttctttccaatatttatcaacttacgctactggtgctattgcacaaaatgtttggaatacgaccaatgcctcctctgcaggctaccagattgctggtaactggtttggtgttttaactgctgtacaatcaattgcggcagtagtttggtcatatgttttagcgaaggttcccaataatcaccacaagctaggttacggtatcagtttgctactaggtggagtaggatatacttcaatcttcttgattcattctcaggggtttttaattctatccttcattttaattggtatcagttgggctggtatgaatacttatccattgacgatggtatctaatgctttatcaggtaaacacatgggaacatacttaggattgttcaattgctcaatctgcttacctcaaattgtagcatcactgctcagcttcatgattttcccaatggtgggtaactccatgccagcaatgatgttgattactggtatttcaggcttcttaggcgctttatcagttttagcaattaaggaaacctacgtaaaatagcataatttttccgataaaaaaaacactgcgtgcattgtcaatgtcattaagttaagctattgacattggagaaaaaacaattaaagcatcatttggctttagatagccaatttgatgcttttttgtgtacgccaaataagcgtagtttgtatttcttttttattaggccacgcgatacatgtaatatactgcagacttggcttttaaatttcgtttgtcttttcgcctttatttttgcaaaaaaaagaatcgaatccaaatgattcaattcctaaaaagatcagttttcaaaagtcaatagcttaacttaatgacattgcattttgaataactgcggagatttttggtataagtcccttaacgatgacctcggctcttattataataagaaaatccgcaaattcacagtgttcatattatagctgtcgttcactcttaacttataatcctaaaataacgttctaatctgtgaagtattgcagaatatcctcctcagttaggcgttttttgtcgtcgcctttgacatcaaaaacgattctaccattgtttaaaatgatagtgcggtttccgtatttgattgcgtcttttaattggtgagtgatcatgacacaggttaaatgctcttcttgcacaactttatcagttagttcaagcaattcgcggctagtatttggatctaacgccgcagtatgctcatctagtaagagtaaatcagggcgcttaattgtcgccattaaaaaacttaatgtttgtcgctgaccaccagaaagattacccacaaaagtatttaagcgttcatttaacccattagggagttgggccgcctggcgtttaaattcttgcatatgtttatctaggcctcttaaacgcagaccgcggtgttcacctcgtttggttgcaagcaataggttttctgcaacagtcattcgcggagctgtacccattttaggatcttggaatacttgggcaatatatttagcgcgttttacttcagaaagattggttaaatcttggtctttgagcagaatttttccgctagtaggaaaaatagagccattgataatatttagtagcgttgatttaccagcaccgttggttcctaaaagagtaacaaaatctccatcttcaagttttaaattgatgtttttgaggatttgcttttcctcattggtaccagcattaacagtagtagtaatattttgtaaatcaagaatagtactcatggtttttcaacgcctttctttaataacttacgagtgcggaatttttgttcaaataatggaagcatcatgcaaatagcaagaataatagcggaaatcaatttaaagtcgttggtactaaagccaagttggaggactaggagtaagataaggcgataaataatactgccgataacaactgctaccaagcgggcggttaaacttaaattaccataaacgacttcaccaataatgatggcagctagtccgataaccatagtaccaatacccatattaacgtcagcgtaaccaccgttttgggctaataatccaccagctaagccgatcaagccattagaaagcattagacctaagattttcatattatcggtattgatcccaagagattgggccattttttcgttgtcaccagtggcaataaaggcttgaccaagatcagtatcaaggaaaactgctagcaaaacgatgacgataatggcaatgatcaaaccaacaacaatagtaggaaaattgatcggtaatttttgtaaaagctgaccgtttagtaaagtatttttgttaagtaaaccaacattagccttgcctagaattctaagattaactgagtagacgccagtcatcgttaaaataccagctaaaagaacaggaatttttcctttagtatatagtaagccggttactaagccagtgaccatgccagcgaagaaggaaagaatggtagctgctaaaggattgacgccatgaactaaagcactaacacaaattgcggcaccgaaggggaaggttccttcaacagtcatgtctgggaaatttaaaattctaaaagttaggtagaggcctaaggctaaaataccccagagtaagccttggccaatagaagaagtaattaagctcatttgataattcgtcctttcttttgggcagcttgaattacactgttaggaatagtgatgtttaattcatgtgctgctttttcattgattactgtttcataatgggttacgcgtctgactggaagagcagcagggtttttaccatgtaaaatttgtcctgccatttgtccagttaagattcccatgtcgaattgactgacacacctggtagcgagaccaccacttttaaccatagtatcggcagcaggaaaaactgggatcttggcactgttagtagcctttaataaggtggcaattccactagctacagtattgtcggttgggacataaactgcttgaaccttgcctaccatggtttgggcaacttgttcgatatcattggttgaagtgatagtgtaagggataactttaagtcctgttgcttcagctagtcgtctgaattcacggtactctgatgctgatgaatcatcacttgaggtgtaaatgacaccgatgtttttggctttaggtagaatttcttgcattaaggccagctggctggcgattggctggcggtcctggacaccggtaattttaccgccgggatgcgctaggctttttactaaatgggccccaagaggatcgctgaccgcgcccataactacagggatgttgccagaagtattagctagagattggacagcaggagtggcaattccaatagttacagtcgcattttcctggctaaaacgatcgctcattgatttcagattactttgatcaccttgggcattttgaaaatcaattttaagattttttcctttgacatagccttcatctttgagaccctgaataattcctcgatgaatctgatctagagcggggtggctcattgtttgcaagataccgacagttggcgttttcttttccgcatttttcttatttacttcactgacaaatgcaactgccagaaaagcaaaaagagcaataattgttccgattaaccttttcattctttttctccttcaaacaaaaaaggcacttccttttttcgggaaatgcctaaaacaaaacccgcacgttattttccgtgcgagcaatatttcttgaagattttaccagcacagatacgatcttaatgagtcgcatctgtacttcacgaacagaaacaactctagtgctggaattgccaacgattgattgctgtaaatttaatcatgataaaatcttcctttcgttcaaatttgttagctaaattttaagtaattatgagaaagatgtcaaatgattttttgttagatttatttagttttgaataatttttaaaatgctataataattattccggcaaccatcataaaaagaagggaggaattctcttgcgctatcaacaaataatttttgatgtagatgacacaattatcgattttgcggcaactgaagattttgctttacatagcttgtttaacgctcatcactggcctttatctgcggaattgcagcggcagtatcattcttataatcaaggactttggcgccaacttgaacaaggtgaactaacttatgaagagttaagtgaaatgacttttcatgattttattttggatcattttggcattgagattgatggcaagaaggcaatggatgaatatcgttcatactttggtgaagcacaccaattattgcctggggttgaagatacgttgaaatttgctaaaaagcagggctataagctgaccgttttgagcaatggtgaaaaatttatgcaaaatcaccggttggagcttgctggggtgaaaaaatattttgacttaattgttacgtcagaggaagcccattattctaagcctaatcttcatgcctttgactatttcttcagtcgaactgagatcggtcctagtgagacagtcttttttggggacggcctacaatctgatattttaggtgcagaaaaatatggctttgatagtatttggtacaatcatcgccatcgtaaaaataccttgcatttgcatcctaagtttgtagtagaaacttatccagaattggttaaattaatgcagaatgattttgagaagaagtactaatcattatactttttgctcttcaagaagatgccccaaccaatagttaataagctgacaaaaattattaaaatccaaaagccgttttcattttctttacctggtaagccgccgacattcatgccccaaatgccactgattaaagcgggaagagcaattaccagggcagctgaatctagatatttcattaaatgatttaggtgactgtccatcatggcggtaaagaggccgctaatggaattgagcaagtcagtgtaaacgtgaatcattttggtaattcgtttttgcttggtcatgatacttttgacgcgggcttgatttgctagcttgttttctactaaataattaccaaattcttctagactaggtgtttgatcatctaaggtatgctttaagtaaactagctggcgagttaaatctgttactttttttaattctttggtcttagttgttcttcttgcagcttgatctaaatggtcaattttttgtttaattgttactaattctgcatgaagatgcttgatttggatacacaggctttgaaaaattgtttcaataatattttcttgcggttttaattctgaaagacttcttgttgtgccaataaagagatgattttggtcaaaaattgtaaaaattggaattagctcttgttcaattggcaagtcattacttaatagatcgaaactcactaataagtgaccattttttagtttattagaatcaatagggataaaacgagcaacctcaatcgaggaattagggtaagtgaaaattgtaggatctagatcccattttttgattaaatgatcgatatcgttttgcgtcaattgatcttttaaaattatattctgactattagtaagcatatttgttcacctctgtttcttttttagtttaagattaacatgtaatgttttttagactgaattaagttgacttgaaaatatgtttttttaaaaaatatagaaaggtgagaatatggaattacattcacttactgatacttatactttgaacaacggcgtaaaaattcctgtaattggtttcggtacttggcaaacaccaagtggagaagttgcaagagaatctgttgaagccgcacttgaggcgggataccgtcacatagatactgctgcagcttacggcaatgaagaaagtgttggcgaagcaattaaacgtagtggcgttaaccgccatgaattatttgtaactactaaattgtggaattccgatcatggttatgacaagactaaaaaggcaattgatactagtctagaaaaattagatttagactatcttgatctttacttaatccattggcctaatcctgtagctatgcgtgacaactgggcagagcttaacgctgaaagttggcaggcgatggaagaagcagtgaaggctggcaagattcgcgcaattggtgtatccaactttagaaagcatcacctggatgaattaatgaagactgctgaaattaagccggtagttaaccaaagttacttgaatccgagtgatttgcaaccgtaagtaacggccgcaagcaaggaatatgatttgcttaatgaggcttacagtcctttgggtacaggtggtttattaggcaatgaggtagttaatgcagttgctgaaaactatggtaaatcaccagctcaaatcttgattcgctggtccttacaacatggctttttgccattgccgaagtcagttcatcctaagtatattgcggctaatggtgatgtctttgactttgagattagtccagaagacatgaagaagttagatggtttacgtggggcaagtaagttggctaatgatccggatgaggttaacttttaatttaatttggaataaagaaaattgaattatcacaagaagtatcttatttttgaagtaagatacttttttattaggtgagacaatgaagaaaattacaacaggaattgtagctcacgttgacgcgggcaaaacgactctttctgaggctctgctgtacaaggcaggaaatttgcggacgctaggaagagtagacaatggggatgcttttttagatacagatcaattggagaaaaaacgtggcattaccattttttctcatgaagctaaattaacgactgatgatttagaaattacgttgttggacacaccgggacacgttgatttcagtgcacaaacagaagaaacgctgagtgtacttgattatgctatcttggttatttcaattacagatggtgtaactagttatactcgcactttgtggcatttgctcaagcgatatcaggtaccagtttttatttttgtgaataaggttgatgcgataggcgctgatcgagggatggcgttggttgatattcaaaagaacttaagtgagagttgcgttgatttttcgaagattgatgatgaattttatgaaaatgtggctgccacaggtgatgccttgcttgagaagtatttggatagtggtgccatttatgatcaggacgtgcagaatgcaattgtgcagcggaaagtttttccaatttattttggttctgcgttgaaattaacaggaattacggaatttttggctggttttagtaaatggactaaggaaaaggaattctctgataagtttgcggcacgatgttttaagatctcacatgatgctaagggtgaacgcttaacttggttgcgaattttgggtggcagcttaaaggccaagactgagctagctggtgagaaaattaatcagttgcgtagttataatggtgaaaaatttgcgactattacagaagcagctgctggagaaattgttgctgcaacaggattgactaagacgtatccaggacaaggattcggcgtgggggatgcaccaactgcactgcttaagccagttttgacctataaagttaatccccaggataatgatcttcacgcttgcttaaaagctctgcaaaccttggaagatgaagatccacagctgcatgtgacttggtccgaacatttgcaagaaatccacgtgcaagtgatgggaaagattcaattagaaattttagaacagttaatgcaagaacgttttggtttgaatattgtttttgaacagggaagtattctttatcaagaaacaatcactaaaccaattgaagcagtaggccactttgaaccgctacgtcactacgcggaagttcatcttttactggagccactgccacgtaatagcggtattgtttttgaaaataaatgcagtttagaagttttgactaaaaattggcaacatcaaatcatgacggcattgaagtctaaagaacatcttggtgttttgacagcttcgccgattacagatatgaagattaccttgatcggtggtaaaggctcaattgtacattcggttggtggcgatttccgtgaagcaacttatcgtgcagtgcggcaaggtttaatggaagaaaagatacgccaacaaactattttgctcgaaccgtggtatgattttcgcttagaaataggaaaagatcaggtagggcgtgctttaaatgatattcagcgcatgaatggaaaatttagtacgcctgaaaatattggtgaacgaacagtcatatccggttctgcaccggtagctgaaatgcaagattatgcgacagaagtgcgcaattatacgcatggtgaaggtaatcttgaatgcgtagtcagtggctatttgccttgtcacaatgcggcagaaattattgaggaaaagaattatgatcccgtttctgatctggagaatacgcctaactctgtcttttgttcacatggtgcaggtcacaccgtcacttgggataaggtgccagagactgcacaatatccttatacttatccattagattagcatgataccatgaattgtttatcttgttacatgtgaaacattaaaaatgcggcatagtgcttttcttattaaaaagtgcaacttgaaataagcgaaatatttgactagttatgaaagaaatttcattttattagcaaaatactgctagaaaatcgcttgcatagtaagataaaggtacgatagaaaggtgataaaacatgacacaaataccttttaaagctgtagcggttgatctagatggcacttttttgaccgaaaaaaagacttttgatcatgcgctatttgcaaaagttttacgaaaattgcaagctaatcaaataccgtttatctgtgcaacagggaaccaactaattcgttcgcatgaatattttgacgagtttactaatgaagtagattatgtgtctgaaaatggggcaattctagaagccgatggcaaagtatttaagcggattgcgattgactatgatactgcacaaaaattgttacattttattcaaacagaataccctgaagcaatcattatggttagcgcacagcatcattgctatattttgacgagtatggatcaagcggataaagacgacattagaatttattatcgtgatgttcaggaaatcgatcagtttactgacattgatccagccgatgcgatcttgaaggtttgtctgacagctgatgatgaactggcgcaggtgattcaggatcggtttaatgaaaaatatggtgactgtattcgcggcactagcagtggtaatatgacaatcgacttggtgcataaaggcattaataaggccaagggcgtagacgatatgcttaagcattatggcattgcgcaaaaagatttgattgcctttggcgatggcgaaaatgatattgatatgcttaaggcatgtggctatagctatgcgatgaaaaacgccaatgcgaaggctaaggcggtagcaaagtatgaggcgccaacgaatgatgaaaatggtgttttgaaagttttggctaagtatttagatattgattaatttaatacgcaaaaaagacttgagaagtaattttcccaagtcttttagtttgctttattaactgctctgaaaatattaagtccgctaattagaatgatgaatccacaagctaaaatcagaaccgtttcaccagagctgtctaacaaaattccggcaacaattgaactaatcggtccaccaatagaggtactggtacgaatagtagttagcactctgcctaatatttcatcgtccgcagtaatctgaatcaatgattctgccaaaatattgtgaatactcgtcattagcccaaataagaaaattagtcctgtgaatatcaaccaattgttactgaagaaaattatcaaaagtaatggtactgcactagctatccaagtaaaaccaattgtttttacccgtacggataatcttcctgcaatagttgcacctattacaaagccaatcataaaactgatatagaacatactgtatagtcccgcttgaccattttgttgagcaattcttggcaacagaatggccattgctggcgtcacaaaagaatacaggattgaggaccagaagtaatgacttaagaaataatttgttttaataaacttatagccattaagaatttgattgaggtattttgcctctgcttttttgactttaggtctatctttaatttcttttagggcgtaaaacagaaaaacaaaactgattaggctcagtagactgcagatcaacattacattagctgaaattaaaaaagttaataaaaatccagaaagagcagttcccgctacattcacaagctggtcgatgttgctaactttagaaattagattatttaattcttggtcatcagccgttgtttcttttaaaatagcccggtcagctggattaaaaaattcatcgcagacagatactattcctgcgcagattaatgccaaaatataacttttgctaagttggtaaactgcaattgttgtggcaaataggaaaacagtttgaacaagaattgaatagtaacttgtccttttgaatgaataatgatcgataatggggccgtagaatattgataaggcggcagtggtggaaaagatggcttccgcaattccgacgacaaaggaacttttggtggaagtttgcagccaccagataaagaccatgctgaagagggaattagctagtccgccaacggcacgcgagaaaaaatatgatttcttttttaacattttatttatcctattctcatttttattttccaattataccaatatttttccaattaggatcaatttaataaaaatagtacaaaaaaagacttgagaagtaatttttcccaagtcttttagtttgtcttaatttaggttaattaaaacttgttcttgtccaaagcaactggagaatctggcttttcaccattgatcatcttcaagttgttgtcgaatgccttaacaaccatgttacgtacggcgtgggtggtgtagaaggcggtgtgtggagttaccaaaacgtttggacgatcaattaagtcagctaaacgcttgtctgggaattctttgccttcccaatcttcgttaaatacaccaacttcgtcttcgtaagtatccataacaaagccaaagatcttacctgagtccaaaccgcggataacagcgtcagtgtcaacaagtggaccacgtgagcagtttacaattacaacgccatctttcatcttggcaattgattcgtcattgatcatgtgtacatttgctggaacatctggtacgtgaagtgaaattacatcagcttgcttgtacaagtcgtcaagtgagtcaacgtagtaacccttcttttcgagttctgggttcttgaagatatcgtaagcaatgacctttgcgccgaaaccttccataattctcataaatacttgaccaatgtgaccagtacctacaacaccaacaacttggtcacgaacttcacgaccaatagtaggtgcccaacgtaagtcgcgcttagccatcttttcgtccatacgcttgtcttgacgtaatacacgagcagcttggattgcagcatgttcagcaatagcgtcaggagagtatacaggaacgttagtaatttcaaagccaagttccttagccttgtccatgtcgatgttgtcgacaccaacgttacgtaatgacatcttagttacgccagcgtctgccaatgcttgaagagtttctggggtgtagtctaattgttggtaaacaacaacaccgtcagcacccttagctaacttagcagtttcaggagtcaaaagcttatcagtgtaatctacatcgatatccttgtgagcatccttccattcgtttaagaatggttcttcgtctttacgaatagcgtaagcaaaaatctttgtcataaatttaacctccgtaaaatttattagtatgaccagtcctcattatacgcttttacttgctcaacaaaacacaaaagaaccatttttttgtatagattttaagaaaaataaaagtcaagttttactctgagcaaaaaagttgcaattttttcaaaaaaagtttatagcctaaaaattgcaactattattaactgttacctaatctcaatcccatagatatgaaaattatttttgtatatagcaatattagttaaaggtagtatatggatttgtataagagacgcattttcgttatataacccaggttatataatggactttaagtagagaaacaaacatagcggaggaaaattgaatatgcattttaaaggagaaagccaacagcatttcagcctaagaaagctgacaattggtgttgcttctgtaataatcgggaccacctttatgttttttggtggtcatgctgttcatgcagatgatttaagtagagatgctgagcaaaccagctcaattgttcaaaaacagagtagtgagaaaatagatgtagatgcagtcaaagaagctgataatgtttcaaatcaaagacaagacttacccagacggtactaagagtaccgcaactgttcctgtaactgtcattgcaccaaatgtaccagacgttatctacgtaccaaagggtgacaagtttccagacccaagtactgtagttactaactctaacgatatcaaggacaagattcctgacacgacttacacttggaaaactactccagatactccaaatactaaagtagtaattaactataaggctaataatcctggtactccagataccccagttactccaccagtggatccaggcgataatccagcaaccccagttaccccgcctgtaaagccagagcagaagccaacaacaccaactcctcatgctactaagacaccagcaaaggataatggtggcaagaagacagtagctagtgagcaaaaatctactttgccacaaacggggaagaaggataacgttgctttgactgctatcggtgtagctattgcagctgctggaagcttattaggattagcagatagcaagaagcatagatcttaatttgtaatatctaatttctgtttactaagaagcaagttgactcagataggagctagcttgcttttttgtctaaaagtttaaggatttctaaagacaaaaagcaaatagtgacgcattgtcataaagctgatattatatactcataacaaaaatacaacgcatcaaatagagatgaattgtaagaaggtaacaaatcttctaattccttattaatacatcctattgggcctttattaattcatacattgggtattgctttttgctggttgtcccctatgcaaccgcgaaagttaagattgataataagtccatcccctttttgcgaaggtaaagagtcaagaccccctgcaacatctcttgcgttgaatcttttgttaatcttgataatttatcttcgcaacattagtgatgagtaggctaatgtaaaaaaatctcgttattctcattcaacacaactcccttaaaagggctggtttagaaaagtcatctaaatcagtcctttttctttttttcgttataattaaacttgagaactaaaacaaaggggaagaaaaatgatcttaatttcatggaatatcgattcattaaatgcagctctgactggtacttcagctagggcggaagaaacgcggcaagttttaactaaaattcatgatgccaatccagatattattgcgattcaagaaactaagctgcgtgcaactgggccaactaaaaaacataaagaagtgttggctgaaaagttccctgagtatgactatgtttggcgctcttcagaagaaccagctagaaaaggctatgctggtacaatgtatctttataagaaaggattaactcctgcagtgtctgagccgattattggcgcccctgagccgatggatcatgagggacggataatcacactggaatttgataaatgctttgtcacccaggtttatacgccaaattcaggcagtggtttaaagcgactagctgaacgtcaagtttgggaccaaaagtatattgaatatctgcaaaaattagatgaaaaaaagccagttttagctagtggtgattacaactgtgctcataccgagattgacttgaagcatcccgaaaataatcatcactcagcaggttttactgatgaagaaagagtcgactttaccaatttgctcaatgctggctttaccgatacctttagaaaagttcatggtgagattactggcgtatattcttggtgggctcaacgtgtcagaaccgctaaggctaacaactctggctggagaattgattactggctagtaagcaatcgcattgctgataaggtggtccgctcagagatgatcgatacaggcaaacgagcagaccactgcccaattttgcttgaaataaatctttaaattgaagcaagccctagtataatttctttttgaaatgtttttattttgaaaaagaagtaggggttgaaattctttgaataacgagaaaaaagaagattgggctttggagcaggatctgaagtacaatcgtctgacagcatttaagctattcgcgatgactagttcaatggttatttccgttgatgaactcgcaccatttggtaaaactggagcaacggcactgttttacttgttaattgctggaatcgcttggtttatcccgattacgcaaatggctggagaaatggcctcaattgatggctgggaaaaaggcggaatcttcacttgggtgaaaggatctcttggagacaaaacaggctggacagcaatgttttatcaatggattcatattactgttggtatggatacgatgatgtatgtgatcattggggcattgtctatcacatttgggacaccttggttaaacaccacgccaatcgtacgcttcattttaatgatggttattctgtggggagcaacagcgattcaggtaattggtgttagaaagattggtcgaatcgctgaatggctgtttattctggggattgcgacaccagtaattttattgatcatttcattcttcgtatatgtgattcaggggcatcccttgcatatgacgattaactggaatactgtaattccacataaattgaatggtaatacattagttgcctttgtcccatttatgttggccttttgtggtggggaagcttctgcaccgcacgttaaaaacttggaccacatcaagtcatactcaaaagttatgcttggcttagccgttactgcaatctgcttcgacttgctaggtagtatggcaattggaatgactgtgcctaaggatcaaatagagaacagtacaggctttgtttatacctatggcaagctgttaacgtcaatcgggctacctggtgatctgttgcaaaaaattgtgggtataatgttagcctgcggtattattggtgagctaggcaactggattgctggtcctaatcagggaatgtatgaagcggctaaagagggctatatgcctaagttttttgctaaaaccactaagcacggcgtgccattaagaattatggttttacaatcaagtatcgttaccatttctgcattattgattacttttaccagtggtgccgatgcagattttgcgtttaacgtttcattggccgcaacgacggcgcaatatctcatggtttatatgattatgttgattgcttacatggttttgaaaagaaagcatgaagattatcaccgtatgtattacatgagcaagaaccctaatttgagtattgcaattgcggtgcttgcattaatcatcacggttatagctttctttgtaacttttgttccagcacaaggcacgccaagcaatttgcgtcacgtttatgtttggaccttaatcggcatgtgtgccattgtgtcgattttgccacttattttgtatcgctggcatgaaaaatggcaatcacaatagaattaagaagcattcgtttttcaagacggatgcttttttagtagaatttgagagaggtgaataaaatggcggatgcgatgagggatgcaatattaaatggttttgttgatcaaaattatttaggaagtgaagaattaggtcctaaaatattagctaataatcagcaagagagaatctggcagaatttgcgccaggaattgtatagttgcaagtcctttacttgggcggttgcgtttattacgcaagacatgctagttccgtttaaggtgataatggcagatttagcgaaaaatggaattagtggcacgattattactggtgattacttgggttttaacaatccgcgtgtttttacggaattacaaaagattcctaatttagaagttcgtattgctaataaggcaggtttccatactaaaggatatttatttgatcatgaaaactatcaaactgtgattattggcagtgctaattttacacgttcagctctgctggctaactatgagtgggctttgaaagtaagttcaaaaaagcaagcagatttaacagctcaattagtggataaaattgcagatttgaaacaggatagttttgttttaaattcagcctggctaacagattatcgtaaaaattgggtaaagcctgagcgagttgctactgatcggcatcagacaaaaattttaccaaataaaatgcaaaaagcggctttaaaacagatagaagcactagttacaagtggtgaaaaacgagggctagtagtgtcagccacaggaacggggaaaacttatttaggtgcttttgctgttaagaaatatcagccgcggcgttttttatacattgtgcatcgtgagcaaattgctaaaaagtcattagaaagtttttatcgtgtaatcggtggaccaagatcggattatggcttattaacgggaaataggcacaatttataggccaagtatttatttgcgacggtacaaacgataagtcaacctgagatgctggctaattttaatagcgatgaatttgattatatcttgattgatgaagcacacagggcagctgcaccttcgtatcagcgccttttacattattttaagcccaatttttggttaggaatgacggctacgcctgaacgaatggatgagcaaaatgtttaccagatttttgactacaatttggcatatgaaattcgtttgcgggatgcactggaagagaagatgctggcgccatttcattatgtgggtgtccaggattatgaagcagacggagtagtgattgatgaaacaacagatttacgctacctagcttctacatctcgagtagactatgttttaaaggaattagactattacggctattgtggaacaaaggctaaaggcttggttttctgcagtcgacaggatgaagcacgtgaattagcttggctttttagtcaaaaaggacatcccgctgtagcattgaccaatgaggataatgaaaaaagacgtaatgaagtggttgcgtctttagttaaaggtgagattgggtatattgtagcggttgacttgtttaacgaaggaatcgacatccctgccttgaatcaaattgtgatgttacgcaacacacagtcgagcatagtgtttatccagcagttaggccgggggcttcgtaaatatcctggcaaagattttaccgttgtgctagattttatcggcaattataaaaacaattacatgattccgttggcactgaatcaggatacttctcgaagcaaagatcaagctaaacgagaaacgcgtctgccaagctttattgatgtttcaacgattaactttagtaaaattgccagtgaaaaaattttggcttcgcttgatagtgtcaagcttgatgggatgcgtgaattgcggcagagttaccatgatctcaagaacaaactagggcgtgtaccgctactatttgatttttatcaatatggctcagttgcaccgattgtttttgcacaaaatcatggcttggcaagctatgctgactttttgggtaaaatgggcgaagacgttaatttatcaaaatatgaaaatgaagtgctgtcttttgtgactaaggaattacttaatggtaaaagaattcacgagttacttttgttagagatgctacttgaacaagatattgttaagcaagaagattatctagctcaattgaaacgacaccatgcttatgtaaatgatgaattgttagcttctgttgatgcgattttatcgctagatttttttgatattaagcagggaaagactaccaaaaaagcacaatatggtaaattgccgttagttgaacgtagcaatttatttgactatcaattgaatggttctctacgctctgccctagatcaacatgattttaagaatttatttgttgatgctattaaaactggtttggccttaaatcaggaatatgataatcagcgtcaatttactttatatcagcaatatgatcgtaaggacgcttgtcgactcttgaactggcctaaggatgtttcggccccgatgtatggctatcgtgttggtgagcaggacacaccaatcttcatcacttatcataaagatgatcatgaaaagcggaatgctctgtatcgtaatacattggctgatgggcgcagtttgcgctggtatactcgggtaccacggcatttagattctgatgaggtacagcgtttgcttaatacgcgagggatgaatttgcatatatttgttaaaagaagcgatgcagatggtaagcagttcttttatttaggcaaggcaaagattcaagctgattctgttcgcgaagaattgctcggtgttaagaaaaagccagctgtagggatgaacttaatgttgaaacatccactgagtgagtcaatgcatgagttattatttgaatagaccaaaaaagcctttccgcttaggaaaagcttttttaattgccgctaatattaattagatcttggtcatcttggttattatccttatcaaacattctaggcttgatgtgatctagaatcttagtcccgatatttttctgagcagtttcatcaccgctaacctggtttaaaaacataattattccatatcgattatctgtagtcattttgatccaattaccaaaatgagtgttgcttaagctaccataagcagatttagtatggtcatcatctaaatgaagccctccagaataattagtggttgcacttttaagatgagttaagtaatagaaatcggatttgcttaagatactaccattggttaagccaagctggatcttgtaataatccattggggtagtgaacatattgcctgcgcctggaagctgggaggcaagagtctttttaacgtattcagcgtcttggtaatttttaccattattccagacgtaagagataggatcggttttccaactaggaatatcctgataaaggaatgtattagcaagccctaatttgttaatgatgcgattattgaaattgttttcgtaggattgtccgctgattttaataataattccggctaataaaagatagttggtattattgtagaagtaggttcctggtgtcccttgagtgccgttattagtattatcaatagcccaattgatggcgtcattctcacttaaaacttttccgcgatccaattcagtattggttgcttgaatgccagaagtatgggtcattaactgtccaatagtaatattatcggcgtttttaagattagggtaccaacgtgaaattttggtgttttgcgtaaatttttgactagtgtgccagttttcattcatcagctgaattatcattgctgctgtaacaactttttgcaaagaagcagttggataaactacgttgtcgttcccattaccaacttttttaccgtaccaagcgtagccatagctgatttgttgcggctgaccgtttttgataatgacgatactaccgcgagtattgttttgagccaaagtattgcggacaaaatttcgcatttcggttttaaagtatgaactggcttgaacttgtggtggttcagtgatcgcaaatgcaggaactgtcgttagcagcgcagcggtagctagtccaataattgattttttcaaaaattaaaaggcctcccttaaaaagtggtttgtttacattttagcgcgttctttgcatcggacaaactattatcttggtgaaaagacgtatttttagctagcttgttgaaaaagtgcggctaattttgctctgagtgcgggatcatgagcgtataaataggtaccgcggattcctcgcttgaatagaacgttgagtgaattcatgaccatcttctcttcatattctattttttcttttgagttggttagatcattacgctttttgaacatctcaacatctgtaattttgtctaaattaactttaagttgattggtgcggggaatcaggctgattggtggaccgataatgatgccagcataatttaggtcaaaaccttggcaagtatagatagaaccaacttcattgattgttgtaggaatttctgcccaaggagttgatgtgtagttgtattgatcccatggcagcataaatttcccttctttaatgtaatgtttgccaccatcaagagtagatggatagccggaagttgaaagaattcttgccaggccgtctgtttgatttctcttgacgatttcttgccgcattttttctgcatcagtaaaaatacgaaagtcgtagttgtgccacatttctttttttaagggcattaatttattatgtgtaaaaaagttaaaccattctattagactatctggtgccatcattctaaattgatgatgtagttgatagtcttcgtggggataatgatgagtaattgcttcaagtcgcttacgtgtccagaagcttttcattcgtaaaacttggttttcatcaaataccaaaatgataacttttgaccgcttaataacctcctctaattggttatcgtgataaaagttgttgtagtgatcaggctgagataagagcaagtgtgcttcatcaatgacgacaacatcagcactggtttgttttttgtccatctgattaataaatgaagttggccgcatataatttttcttatatagttctttaatcggcccagcaatctgcttatagacttttagcagttcagggtgatttactaaaaagtagttttgagttttatacagttggctgcctgtttggtggtttaatttttgcaactgatcaaaaagggcagaaagcactacacttttaccagtacctgcttcaccataaatagtgaaaacagcaggatgatttttattgctgcaatgtgtaatcgaaaaatgtaaaattttttgtacgagaagtgattgctcttggttgagctgatggtaaggagagagtttaaaacttgcttgattattcaatatttattcacctcgttttcaattataatgaatagaaataataatgataaaggaagaaaacatgactgcacaaaaaataattcacaatcggctatttttaagacaaaaatctgatttagctggcaaaaatgatttacaagttgcgataaacttgcgtgatacgctactagctaatcgtgggaaagctgcggggctggctgcaaatatgattggtcagactaaacaaattattgcgttttatgctggcccgcttccatttgtaatgctgaatccgcgtattattcaaaaaaagcagatgtatcttgctagtgagggatgtctgtcactagaaggcgagcgtaatgttcagcgctatgaagaaattactgttacttatcagaatatggagttagaaacagtaacgcaaacttttggtgactttatagctgaaacgattcagcatgaaattgatcattgcaatggaattctgatttgaatagtagaatatttacgtgattttgcaaaaaaagtaaaaaaatttaaattaattttgcatggtttcagggatgaaaacccacaattttcgaataattagatttgatagaataaaatactttttaatttaatgcaaagataaagaaaaatatattacaacactacctagtgtatcgtgaagaacccgaacgaagagcaagacttgccaaagcggagaaaataaggtaaattaataaagtcgcttcaagagatgcgacgagagcttaaaaacagacatgcaaggaaagaaaacaaataaaaagaaaaaagtacttgcaaagaagtaaataagctggtaatatatttaaatgtcgtcaggtgaaagcagaaaaagcttgagtaagacgaaaaaacaaatcaaaaaagttcttgacaaagaaatgatggtttgataaaatataaaagctgtctgctttgcaaaaaaagcaagacagaggtagtactttgaaaactgaacaaagtttcgctaaaagtgtgtgggtgtaaaaacccaaacaagaagcgaagtcaattcgcaagcaataaatttgagacaaagatcttaaataaggaatgagcaatcattcaaactttttaaaatgagagtttgatcctggctcaggacgaacgctggcggcgtgcctaatacatgcaagtcgagcgagcggaactaacagatttacttcggtaatgacgttaggaaagcgagcggcggatgggtgagtaacacgtggggaacctgccccatagtctgggataccacttggaaacaggtgctaataccggataagaaagcagatcgcatgatcagcttttaaaaggcggcgtaagctgtcgctatgggatggccccgcggtgcattagctagttggtaaggtaaaggcttaccaaggcgatgatgcatagccgagttgagagactgatcggccacattgggactgagacacggcccaaactcctacgggaggcagcagtagggaatcttccacaatggacgcaagtctgatggagcaacgccgcgtgagtgaagaaggttttcggatcgtaaagctctgttgttggtgaagaaggatagaggtagtaactggcctttatttgacggtaatcaaccagaaagtcacggctaactacgtgccagcagccgcggtaatacgtaggtggcaagcgttgtccggatttattgggcgtaaagcgagcgcaggcggaagaataagtctgatgtgaaagccctcggcttaaccgaggaactgcatcggaaactgtttttcttgagtgcagaagaggagagtggaactccatgtgtagcggtggaatgcgtagatatatggaagaacaccagtggcgaaggcggctctctggtctgcaactgacgctgaggctcgaaagcatgggtagtgaacaggattagataccctggtagtccatgccgtaaacgatgagtgctaagtgttgggaggtttccgcctctcagtgctgcagctaacgcattaagcactccgcctggggagtacgaccgcaaggttgaaactcaaaggaattgacgggggcccgcacaagcggtggagcatgtggtttaattcgaagcaacgcgaagaaccttaccaggtcttgacatctagtgccatttgtagagatacaaagttcccttcggggacgctaagacaggtggtgcatggctgtcgtcagctcgtgtcgtgagatgttgggttaagtcccgcaacgagcgcaacccttgttattagttgccagcattaagttgggcactctaatgagactgccggtgacaaaccggaggaaggtggggatgacgtcaagtcatcatgccccttatgacctgggctacacacgtgctacaatgggcagtacaacgagaagcgagcctgcgaaggcaagcggatctctgaaagctgttctcagttcggactgcagtctgcaactcgactgcacgaagctggaatcgctagtaatcgcggatcagcacgccgcggtgaatacgttcccgggccttgtacacaccgcccgtcacaccatgggagtctgcaatgcccaaagccggtggcctaaccttcgggaaggagccgtctaaggcagggcagatgactggggtgaagtcgtaacaaggtagccgtaggagaacctgcggctggatcacctcctttctaaggaagcgaaggatatggagagcaggaatgctaagagaagtatccagagcaagcggaagcacactgagaaactttgtttagttttgagggtagtacctcaaaaagagctagtacattgaaaactgaatataatccaagcaaaaaaccaagacaatcaaagagaacagattgtagagcgaccgagaagagaattcttgagtaaggtcaagtagaaaagggcgcacggtgaatgcctaggcactaacagccgaagaaggacgtgacgaactacgaaaagcttcggggagcggtaagtacgcagtgatccggagatatccgaatgggggaacccaatgcagagatgcattattgattagtgaatagatagctaatcaaaggaagacgcagtgaactgaaacatctaagtagctgcaggaagagaaagaaagatcgatttccttagtagcggcgagcgaagaggaaagagcccaaaccaagtgatttatcatttggggttgtaggactgcgacgtggcagtgtaagagatagttgaattatctgggaaggtaagccagagagggtgagagccccgtaagcgaaatctcaagcacgcctagcagaatcctgagtaggccgggacacgaggaatcccggttgaaaccgcgaggaccatctcgcaaggctaaatactagttagtgaccgatagtgaaccagtaccgtgagggaaaggtgaaaagaaccccggaaggggagtgaaaaagaacctgaaaccgtgtgtctacaagtagtcaaagcacattaaagtgcaatggcgtgccttttgtagaatgaaccggcgagttacgttatctagcgaggttaagtcagaaaagacggagccggagcgaaagcgagtcttaatagggcgaaaagttaggtgacgtagacccgaaaccaagtgacctacccatgaccaggctgaaggtgtggtaaaacgcactggagggccgaacccacgtaagttaaaaattgcggggatgagttgtgggtagcggtgaaattccaaacgaacttggagatagctggttctctccgaaatagctttagggctagcctcgtggagaggataatggaggtagagctctgtttggactaggggcccgtcaggggttactgaatccagataaactacgaattccagatatccatacacgggagtcagactgcgagtgataagatccgtagtcgaaagggaaacagcccagatcaccagttaaggtcccgaaatctatgctaagtggaaaaggatgtggagttgcgtagacaactaggacgttggctcagaagcagccatcattcaaagagtgcgtaatagctcactagtcgagtggcgctgcgccgaaaatttaccggggctaagcatagtaccgaaactgtggatgtgttttaaagagcacgtggtaggagagcgttctaagagcggagaagttgaatcgagaggatcaatggagcgcttagaagtgagaatgccggtatgagtagcgaaagataggtgagaatcctatccgccgaaagactaaggtttcctggggcaggctcgtccgcccagggtaagtcgggacctaaggcaaggccgagaggcgtagtcgatggataacaggtagagattcctgtactgtgtcaaatcgttaagagcgaaggagggacgcaggaggtgaagcacgcatcgcgatggaacgatgttcaagcaacaagtgcggttaagagtcaaatgcttctaaccagcaacacgagttgtgaagaggagtgaattaaaagtagcgaaggtgtggtaatcacactgccaagaaaagcttctagccagagatgacatacccgtaccgcaaaccgacacaggtagtcgagtggagaacactaaggtgagcgagagaactctcgttaaggaactcggcaaaatgaccccgtaacttcggaagaaggggtgctagccaagagattggttagccgcagtgaataggcccaaacaactgtttatcaaaaacacaggtctctgcaaaatcgtaagatgacgtatagaggctgacacctgcccggtgctggaaggttaagaggagagcttagcgtaagcgaaggtttgaattgaagccccagtaaacggcggccgtaactataacggtcctaaggtagcgaaattccttgtcgggtaagttccgacctgcacgaaaggtgtaatgatttgggcactgtctcaacgagagactcggtgaaattataatacccgtgaagatgcgggttacccgcgacaggacggaaagaccccatggagcttcactgtagcttgatattgagtatcttttaaacatgtacaggataggtaggagccagagaagataggacgctagtcttattggaggcaatgttgggatactacccttgtttgaaggatgctctaacctcgacctgtaagccaggccagggacagtgtcaggtgggcagtttgactggggcggtcgcctcctaaagtgtaacggaggcgctcaaaggttccctcagaatggttggaaatcattcgcagagtgtaaaggtataagggagcttgactgcgagagagacaactcgagcaggtaggaaactaggacttagtgatctggtggtaccgtatggaagggccatcactcaacggataaaagctaccctggggataacaggcttatctcccccaagagttcacatcgacggggaggtttggcacctcgatgtcggctcgtcgcatcctggggctgaagtcggtcccaagggttgggctgttcgcccattaaagcggcacgcgagctgggttcagaacgtcgtgagacagttcggtccctatccgtcgtgggcgtaggaaatttgagaggagctgtccttagtacgagaggaccgggatggacgcaccgctggtgtaccagttgttccgccaggagcatcgctgggtagctatgtgcggaagggataagcgctgaaagcatctaagtgcgaagcccccctcaagatgagatttcctttgcgtaagcagtaagacacctcagagacgatgaggtagataggctgggagtggaagtcctgtgaaggatggagcggaccagtactaatcagtcgaggacttgaccaaagcgaagcaaactggaaggttttttgcgagaaggattatgtttagttttgagtgtaaaagctcaaaagagtacggtggcgaaagcaagaaggatacacctgttcccatgccgaacacagaagttaagcttcttaacgccgaaagtagttggtgggcaactgcctgcgaggaaaggaagctgccgtgctcttttttaatattccggcttagctcagttggtagagcgcttgactgttaatcaagatgtcgtcagttcgagtctgacagccggagtaaagggaagaaggaagcggaaggcttcctttttttgtgccttttgggtatgttaaaaggttaattaggctaagcaagcatgacttgagggtcaaatttaatataatcattaatagaagacatagtaaaactcctaacaagcttaattgaattgattacggaggctatgctctctttttaagtgcataaaaatcgaaactgtcaaatcttttgtgtaaatagatctttctcgtaaattgattttttaattatttatttaatcaaagtaggattctaaggtgtcctgaacctgaccaaagcctttatgaattcgattgaaataacggtcattgtagctcattgcctgaatgccaataaaagcatcaagcgactgttcagttggaaactctgccttaggcttagctttacgcttgatgacgttgttaaaggattcaatcatattggttgaataaattgaagctctgatttgtttgggataattgtagaagactagcagatcgggctcaatttccttcaaacctttgatgacatggctataagctttattccatttggcatagaatttgtgcaagacagctgcagcttcttttttgcttgtctgttgatgtatctgcttgaattcgttcatgatcttttcacgatcgtcgacgcgtactttagcgcagatattgcgcatgacatgaaccaggcagcgttgaaaatgagctttaggataagtcctggccaaggctgttttcatgccaacaacaccatcagaaagaaaaagctcaacttgcttcaagcctctggacttcatgttttgaagcatctctgtccaaacttcaatgttctcactaggagcaatgcagtagtcaatgacttccttatgtccattaggtttaatgccaatggcaatatagactgcttcacgctcaaacgtttctcggcgcaaaggaaggtatgtcgcatccaaatagacgcagaaaaacttgtcgcttagcttgcgcttgtgataagcctcaaccttggggagcatctgcttggaaatatttgatacttgagctggactataatgactgccatacattttctcaatcaagtcagcgatttctctggtggttacgcctttggagtagagcttgataatcgtgctttccaaaacatccgagtgctgcttgtagccaggcagcgtgtgctgatgaaattgaccgttgcgatcccggggcacttgcacttcaattgggccaaattgcgtatcaactttgcggaaataagcaccatttctagagttgccagtattccagccatttctggcatagggatcatagcccagaaaggcagtcaattcagcttctaacaagttattaacagcctgttgtagctctttgcgcaataaatcatttattttgtctggattgaatagagcttgagcaaaatctttggtaaaatcattcatgaaggagttcttctttctgtatgtgtttttgtgttcaaaccaatcatacgagaaaggaactcctttttctaatgtttaaagaaataaatttaaggaatcattcatccttacacaaactattttacagtctctaaaaatcttatagatagattattataaatattcaacgacagtaaaattaggtaagcaatctatatctaggaatctgttggggttctgattgtagtaggctaattatacaaaaatgagttaacaaaattctgatcagaattagtacggttaagattgaaaaaatagctggtaattattactgtatctctttgtaattaggtaacaatgctattttttacttctaaaatataattaaaccggtcagacaattcgtattgacctgaatttggataaacagttataacaaaactatgtgtgcaaagcagatgacaggaacttttaattgatctcgtatgttggagcgcgctgtgttgactatttgttctaagtgaacagatgacaagcatgcctctatctaagtaccaagatctaggaaattcattctgaagtagttaatatgtgtcaatatgtcgcacaaaggtaactatgaattacagcaacataagagaaatttgaaaaatagtttttaaattgtggcttgttattagtgaaaatgataaattaaatattattttggcagaaaatacagcttaataacaaaaaataaaaatattttttgcttacctttaaaaatatagttcgagatttataaagtttttaacgagttaaagtgatatttctataattgaaagcagattctactaatgtaattactataatcagaataaatatttcataaaaatacatagaacccgaacgaagagcaagacttgccaaagcgaagaaaataaggtaaattaataaagtcgcttcgagagatgcgacgagagcttaaaaacagacatgcaaggaaagaaaacaaataaaaagaaaaaagtacttgcaaagaagtaaataagctggtaatatatttaaatgtcgtcaggtgaaagcagaaaaagcttgagcaagacgaaaaaacaaatcaaaaaagttcttgacaaagaaatgatggtttgataaaatataaaagctgtctgctttgcaaaaaagcaagacagaggtagtactttgaaaaccgaacaaagtttcgctaaaagtgtgtgggtgtaaaaacccaaacaagaagcgaagtcaattcgcaagcaataaatttgagacaaagatcttaaataaggaatgagcaatcattcaaactttttaaaatgagagtttgatcctggctcaggacgaacgctggcggcgtgcctaatacatgcaagtcgagcgagcggaactaacagatttacttcggtaatgacgttaggaaagcgagcggcggatgggtgagtaacacgtggggaacctgccccatagtctgggataccacttggaaacaggtgctaataccggataagaaagcagatcgcatgatcagcttttaaaaggcggcgtaagctgtcgctatgggatggccccgcggtgcattagctagttggtaaggtaaaggcttaccaaggcgatgatgcatagccgagttgagagactgatcggccacattgggactgagacacggcccaaactcctacgggaggcagcagtagggaatcttccacaatggacgcaagtctgatggagcaacgccgcgtgagtgaagaaggttttcggatcgtaaagctctgttgttggtgaagaaggatagaggtagtaactggcctttatttgacggtaatcaaccagaaagtcacggctaactacgtgccagcagccgcggtaatacgtaggtggcaagcgttgtccggatttattgggcgtaaagcgagcgcaggcggaagaataagtctgatgtgaaagccctcggcttaaccgaggaactgcatcggaaactgtttttcttgagtgcagaagaggagagtggaactccatgtgtagcggtggaatgcgtagatatatggaagaacaccagtggcgaaggcggctctctggtctgcaactgacgctgaggctcgaaagcatgggtagcgaacaggattagataccctggtagtccatgccgtaaacgatgagtgctaagtgttgggaggtttccgcctctcagtgctgcagctaacgcattaagcactccgcctggggagtacgaccgcaaggttgaaactcaaaggaattgacgggggcccgcacaagcggtggagcatgtggtttaattcgaagcaacgcgaagaaccttaccaggtcttgacatctagtgccatttgtagagatacaaagttcccttcggggacgctaagacaggtggtgcatggctgtcgtcagctcgtgtcgtgagatgttgggttaagtcccgcaacgagcgcaacccttgttattagttgccagcattaagttgggcactctaatgagactgccggtgacaaaccggaggaaggtggggatgacgtcaagtcatcatgccccttatgacctgggctacacacgtgctacaatgggcagtacaacgagaagcgagcctgcgaagacaagcgaatctctgaaagctgttctcagttcggactgcagtctgcaactcgactgcacgaagctggaatcgctagtaatcgcggatcagcacgccgcggtgaatacgttcccgggccttgtacacaccgcccgtcacaccatgggagtctgcaatgcccaaagccggtggcctaaccttcgggaaggagccgtctaaggcagggcagatgactggggtgaagtcgtaacaaggtagccgtaggagaacctgcggctggatcacctcctttctaaggaagcgaaggatatggagagcaggaatgctaagagaagtatccagagcaagcggaagcacactgagaaactttgtttagttttgagggtagtacctcaaaaagagctagtacattgaaaactgaatataatccaagcaaaaaaccaagacaatcaaagagaacagattgtagagcgaccgagaagagaattcttgagtaaggtcaagtagaaaagggcgcacggtgaatgcctaggcactaacagccgaagaaggacgtgacgaactacgaaaagcttcggggagcggtaagtacgcagtgatccggagatatccgaatgggggaacccaatgcagagatgcattattgattagtgaatagatagctaatcaaaggaagacgcagtgaactgaaacatctaagtagctgcaggaagagaaagaaagatcgatttccttagtagcggcgagcgaagaggaaagagcccaaaccaagtgatttatcatttggggttgtaggactgcgacgtggcagtgtaagagatagttgaattatctgggaaggtaagccagagagggtgagagccccgtaagcgaaatctcaagcacgcctagcagaatcctgagtaggccgggacacgaggaatcccggttgaaaccgcgaggaccatctcgcaaggctaaatactagttagtgaccgatagtgaaccagtaccgtgagggaaaggtgaaaagaaccccggaaggggagtgaaaaagaacctgaaaccgtgtgtctacaagtagtcaaagcacattaaagtgcaatggcgtgccttttgtagaatgaaccggcgagttacgttatctagcgaggttaagtcagaaaagacggagccggagcgaaagcgagtcttaatagggcgaaaagttaggtgacgtagacccgaaaccaagtgacctacccatgaccaggctgaaggtgtggtaaaacgcactggagggccgaacccacgtaagttaaaaattgcggggatgagttgtgggtagcggtgaaattccaaacgaacttggagatagctggttctctccgaaatagctttagggctagcctcgtggagaggataatggaggtagagctctgtttggactaggggcccgtcaggggttactgaatccagataaactacgaattccagatatccatacacgggagtcagactgcgagtgataagatccgtagtcgaaagggaaacagcccagatcaccagttaaggtcccgaaatctatgctaagtggaaaaggatgtggagttgcgtagacaactaggacgttggctcagaagcagccatcattcaaagagtgcgtaatagctcactagtcgagtggcgctgcgccgaaaatttaccggggctaagcatagtaccgaaactgtggatgtgttttaaagagcacgtggtaggagagcgttctaagagcggagaagttgaatcgagaggatcaatggagcgcttagaagtgagaatgccggtatgagtagcgaaagataggtgagaatcctatccgccgaaagactaaggtttcctggggcaggctcgtccgcccagggtaagtcgggacctaaggcaaggccgagaggcgtagtcgatggataacaggtagagattcctgtactgtgtcaaatcgttaagagcgaaggagggacgcaggaggtgaagcacgcatcgcgatggaacgatgttcaagcaacaagtgcggttaagagtcaaatgcttctaaccagcaacacgagttgtgaagaggagtgaattaaaagtagcgaaggtgtggtaatcacactgccaagaaaagcttctagccagagatgacatacccgtaccgcaaaccgacacaggtagtcgagtggagaacactaaggtgagcgagagaactctcgttaaggaactcggcaaaatgaccccgtaacttcggaagaaggggtgctagccaagagattggttagccgcagtgaataggcccaaacaactgtttatcaaaaacacaggtctctgcaaaatcgtaagatgacgtatagaggctgacacctgcccggtgctggaaggttaagaggagagcttagcgtaagcgaaggtttgaattgaagccccagtaaacggcggccgtaactataacggtcctaaggtagcgaaattccttgtcgggtaagttccgacctgcacgaaaggtgtaatgatttgggcactgtctcaacgagagactcggtgaaattataatacccgtgaagatgcgggttacccgcgacaggacggaaagaccccatggagcttcactgtagcttgatattgagtatcttttaaacatgtacaggataggtaggagccagagaagataggacgctagtcttattggaggcaatgttgggatactacccttgtttgaaggatgctctaacctcgacctgtaagccaggccagggacagtgtcaggtgggcagtttgactggggcggtcgcctcctaaagtgtaacggaggcgctcaaaggttccctcagaatggttggaaatcattcgcagagtgtaaaggtataagggagcttgactgcgagagagacaactcgagcaggtaggaaactaggacttagtgatctggtggtaccgtatggaagggccatcactcaacggataaaagctaccctggggataacaggcttatctcccccaagagttcacatcgacggggaggtttggcacctcgatgtcggctcgtcgcatcctggggctgaagtcggtcccaagggttgggctgttcgcccattaaagcggcacgcgagctgggttcagaacgtcgtgagacagttcggtccctatccgtcgtgggcgtaggaaatttgagaggagctgtccttagtacgagaggaccgggatggacgcaccgctggtgtaccagttgttccgccaggagcatcgctgggtagctatgtgcggaagggataagcgctgaaagcatctaagtgcgaagcccccctcaagatgagatttcctttgcgtaagcagtaagacacctcagagacgatgaggtagataggctgggagtggaagtcctgtgaaggatggagcggaccagtactaatcagtcgaggacttgaccaaagcgaagcaaactggaaggttttttgcgagaaggattatgtttagttttgagtgtaaaagctcaaaagagtacggtggcgaaagcaagaaggatacacctgttcccatgccgaacacagaagttaagcttcttaacgccgaaagtagttggtgggcaactgcctgcgaggaaaggaagctgccgtgctcttttttaatattccggcttagctcagttggtagagcgcttgactgttaatcaagatgtcgtcagttcgagtctgacagccggagtaaagggaagaaggaagcggaaggcttcctttttttgtgccttttgggtatgttaaaaggttaattaggctactattattggatattcatttatcatttaaaatcgatctgggtgccgttaatcggattaataggctatgtaattaggttatatcaccgattattgccacagaataaaaaatcttcaaattataagaatatcggtattatatcagtttacaaagtaatatttataatgtttgtatgtgttaaacgcaatcaattatatgattataatgtaatcatcagtaattaaagactgtagttgaatcaaataattaactcagcgtataaaatgctgagttagacaaaaaaataacgagcaattctctcgttgttttatggattcattttgatcaaatttttagtttatctttagttgtaaataccaacttgattaatgtgggccaattccagaactggagattgagcgaggtccaaactaacatcacagccagcatggataccattattttcgtcattaagccagtgggtattattagttacgtcatagacagtaccattaaatgcaatataagctggacgtccatttttaccattgtaatttgatagagtttctttagtaaattttctcatataagaagctcctttctaataagatcttgatatattaatggtaacactgtgtcaccttatagcaagagatacgaaggagtcttatgcttttcttatgaaagatgaccacgccacccagcaatatcccaatctagaaagtcataattaagctttttaccataaattttctcgtaggcagcaactttttgtcggtagtcgagttccattatcttatgagcgttttcgttggcgtttagagaaacgtcagggaagattggtggtaaaacatggacaatatatttggtctcataaaaattaggatctttcttttcgattttaggtagatccttaatctcgacaaaagtggagattaccggtacattttgtttagccgcaaaataataggcaccacgttgtaatttgcgaggcttgcgataattccaccacatctcctgttctggataaattaaaacccaattatttttagctaaaactgcactgaggtgcttaggaaattcatttccaatatagctaggactctgaactagtggaatagtgccaacataattcattaaatagcggaaaaatcccggtagcattaggttagtatcttcaattacaattgaaagttgatggtgcatcttgttagcgagcagcttcattggtaaagaatcaacctgattgtagtggttagaagttaaaattgcgccaccaataggtaaattatttaggttctctaaacctacaaattcagttgatccagctaatgctctggataaagtaccaaataagagatgtccaatacgattattaagcttacttgaaaaagtgttacgcttattccaataatcattgaccaatttaaggcgctgatctagggacatttggggatcgccgatttctacttttgctgtgaagttgcgttcattagcagctttttttatatttttaatcactgcctcacgattatcgccaaaaatcatagtgttactgcctctcgtttcttaacttttgcccaattattaggatcttgctcagttttgtcttccttagcaagcatatgatccaatttttcgcggtctgctgcacgctcgtcatcagtataattattgagttcgttctttaattcatcgaaaaactgcgtttgtttggcactatcccagaagtactgtgcatattggacattagcaaaatgccatggcttaaagaaaagattatagtgaatcagaccaggattagttaaaggttcagtgttttcatttggcatagcatcccagcgaggatttaagtgcaaaattctaccttccccgatttcatttaaatagtcttgatcaggagcaatacaatcaaaatgatacttttctaaaagtgtcataaaatggtcaataaaatgttcagcgcgaaaggccctagcattcatgacgagcatgccagagttaatgtatttcttggggtcaagtgccaggacatttttgatgtattttatcatcttgtctacatattgaattgaggagtcggtgcaagcagcaaataaattatcacccaattcggagttgtatagtttagcaagatcgtcgtttacaattgtgtcgctatcaatatagatcaccttatcatattcgggaaaaagttctggaataaagaggcgataaaaaatcgacatggtaaaaaagtcagcgcgaagaaagttttccttacgattttgaataggttgtacaagttgattatcaatatggaaaaacttcacatgaacgtttggactgctaagatcagacaaagctttttgatgctttgatgagagattttgatttaaaaagtaaacagtataatccttatttggatctgtatgtttgactaaagaattaagagaaacagcagcgtatttggtaaagtcatcgctgatactgtaaaaaataggaattgtcataaaattgcctttcttagattttaactgattccgtttgtttaaccttagcccaagtatttggctctttgacaatcatgtcaactttttttgccatccattctaggtcagctcgggccttttgacggtcttcatcagtaaagttgtctaattgctgctttagttcatcgtaatacggcgtagttttagcaacataccagaaataatgaccatattgaacatcagcaaaatgccatggtttgaagaaaagattgtagtgcacgatcttaggatcttgaatttcaggaatgctttcatttggcatagcatcccattctttaggtaggtgataaatcttatcttcgcaaatttcattcatgtaggcttgatcagggtcaacgttatcgaaatgatatttattcattaagtaatagaatttatcaacaaactttttgtctctaaaggccttcatattaaacagaattacaccattattgatgtatttttctgcaggaaaaattccctgacattctttaatgtacttttgtaaaagtggcatgtaacgaattgataagtcgggacatgaagcaaacatgttgtcggcgatatcaatttcatacattttagcaatatcagtacagataatagtatctgcatcaagataaactgccttgtcatattgagggaacaattctggaatgaatagtcggtaaaaaattgacatagtaaagaattgagcacgcaagtagttttccttagtattgtgaattggcttaaccatgtcatcgtcaatatgaaagatttgaacatgaatattatcagttgaaagatcttctaagctctttttgtgctcatcagatatctgttggactaaaagggtaatcgtatagtccttcttggggaaactgtcaaatcttttgtgtaaatagttctttctcgtaaattgattttttaattatttatttaatcaaagtaggattctaaggtgtcctgaacctgaccaaagcctttatgaattcgattgaaataacggtcattgtagctcattgcctgaatgccaataaaagcatcaagcgactgttcagttggaaactctgccttaggcttagctttgcgcttgatcacattgttaaatgattcaatcatgttagtcgaataaattgaagctctgatctgcttgggatagttataaaagaccagcagatctggttctatgtctttcaagcttctgataacatggctgtaaaccttgccccatttggtatagaagtcatgcaggacagctgtggcttcttctttgtttgtctgttgatgcacctgtttgaattcgttcatgatcttttcacgatcgtcgacgcgtactttagcgcagatattgcgcatgacatgaaccaaacagcgttgaaaatgagctttaggataagtcctggccaaggctgttttcatgccaacaacaccatcagaaagaaaaagctcaacttgctttaagcctcgggatttcatgttttgaagcatatctgtccagacttcaatgttctcgctaggtgcaatgcagtagtcaatgacctccttgtgcccattaggcttgatgccaatggcaatatagactgcttcacgctcaaatgtttctcggcgcaaaggaaggtatgtcgcatccaaatagacgcagaaaaacttgtcgcttagcttgcgtttgtggtaagcctcaacctttggaatcatctgcttggaaatatttgatacctgagctggactgtaatggctgccatacatcttttcaattagatcggctatttccctggtggtcacgcccttggagtaaagcttgataatcatgctttccaagatatccgagtgctgcttgtagtcaggcagcgtgtgctgatgaaattgaccgttgcgatcccgaggcacttgcacttcaattgggccaaattgcgtatcaactttgcggaaataagcaccatttctagagttgccagtattccagccatttctggcatagggatcatagcccagaaaggcagtcaattcagcttctaacaagttattaacagcctgttgtagctctttgcgcaataaatcatttattttgtctggattgaatagagcttgagcaaaatctttggtaaaatcattcatgaaggagttcttctttctgtatgtgtttttttgttcaaaccaatcatacgagaaaggaactcctttttctaatgtttaaagaaataaatttaaggaatcattcatccttacacaaactattttacagtctcttcttggggtcagtatggtcaattaatgatttaattgaaacatatgcatatggcgtataattatcgctaattgtgtaaaaaacaggaatggttttcaaaataagatcctcctaaattatttttttaaattatttcgtaatttgagatattcgttaagcaaatcatcatattaatgtaaatgaagtacactgtgtacgcgatcaacatcacatggcttaactgtttgagtatggaaataaggccaaaacctaaagctagtagtgaaatgttgaattttggtgtttttttgcaaatgatattgctcattataacggcgtggtgctactcgcttggctacagctagcttgtttattgctgattggtcgggcaaaaacatttgcttaacctgcatcatatgccgcatctcggcaaagagatcagtttgcttaattttcttcatattcagcaacaaaacgccagaattaagataatcaaatgcgcgcttggtcttaagattgtggaagaagaagcggccccaataatcaagtacgcccactaattcgattccggtaatatcctcattgtaaaaagttgtaatatcaccgcgaatgacaatgtcatcgtctaaataaagaatgcgatcaggaatctgtggcaattggtctgcaaataaacgcaacatagcatatggcgtgaagcgagtattcatgttagcggttggcggttcctgttcaaataacttggtgcagtcaattaattcaactgtactgttaggattggctttttttactaaagaacgtaaaaaatcagccgcatgttgtgagaaagggtgatatttacgttcatcactgtgtgcctccatcgttaaaatataaagatgcaattcttgagcaccagaatttttgattaaagataaggtggaaatcaaaacgccatcttgagcattttcatctccacaaaaaagaatattcatgataaactcctattttttatttcttttgaatatattgacaatattcataatcgctattttttgcacgctgcttcattacctgccaaatttcatcgtgaagcttattttgagcttccttacggcttaaatttgtatccgggtaaaagggcccatcaatgtaaataacggcactaggccgcttgctaagccactttttatggtaggttttggtcatgacgaaactaggcgcatttaatttaactggaaagtgcatgcttgttgcatcgaacgggcgaatcttcgtgtaatagggccagacatgagcttcagggtagatgagaatctcgccctttttatccttaatcacagtttgaatggctttaattagtttgagcgattgcttcatatttttgccaacaggcagaccgccgtagcgtacaagatatttgccaatgaaggggatgccccagttagcttgattagcaatagcataaaaatttttgattggaaaaattgtgagcgaggtaaagacatcccccatgggtctagtatggttgccataaataaaatagcccccattgacttgcttaagtttttcttgaccaacgacttttacatgatcgaagaagcggaaaaccacccaaccaaaagtgcatgctaagtgacgagcggtagtggaccagattctagctccaagagaattaggtagaataacgtaattatcgggtagactgaaattttgatcgtgactatcgactacatcatcggttgttttttggtaataataaatccgtttcatcttgccctccatgatacttatgtatcctatgataccatggaaaaaagcctaattcctaagacgagaggaatgctgaaagaaaataaaaaagattcgtaatttcatgatcgaaaaatacgaatcctctgtaaaatagcataaaaaaagcaccgccttcttgcagtgcatctttcatattatgggtggccaggggatcgaaccctggacccacggattaagagtccgttgctctgccagctgagctagccacccatatttgttcatcagctcccgccgacatttaaatatattaccagtagttttataatttgacaagctttttttgaaaaaagttgaaaaataatttgaagctagcaaaaagcgcccataatggccgcttttttactaaagtttatcttgaatatgataggctgtgccttgctgatcctgcttcatgtgatctgcatagtaaacagcatagacaccgctttgatcatttttggcaatcacaatttggcgccctgttggacgttctgccttaatgatttgagcactgcggcgtgcttctttaaagtcgtgtgaagatgcgatggcatcccctggattaaaaaatacagcttcgttcattgtaaagccccctcgtacaaattctaattttattttaccaagaaagccctttctaaatccaatttaagaaacaaaaaagagataagatcaacatcttatctcttacgaaaaatattatgggtggccaggggatcgaaccctggacccacggattaagagtccgttgctctgccagctgagctagccacccatgtcgttgaatcaatcaacagatattattatgctattgttgataagaaaatgcaagctttttttgaaaaaaaacaaaaatttttggctaatgttacaaaattcagtataatgtaagggcaaaggaggcattcccgatgccaaagaagattctcgtcgtcgacgatgaaaagccgatttctgatattatcaaatttaatttaactaaggaaggctttgatgtcgacaccgcctatgatggcgaagaagctgttaaaaaagttgacgaatacgacccggatctaatgattctggatttgatgttgcccaaaaaagatgggttggaagttgcgcgtgaagttcgtcaaacgcatgacatgccaatcatcatggtaactgctaaaggtactgaaattgataaagtcttaggactggaaatgggtgcagatgactacgtaaccaagccgttttctaaccgggaattagttgcccgtgtgaaggctaacctgcgtcgtcgtgatattgttaaaaaagcagaagctgccagccaagaagagaccgataagaatattaagatcggtaacttggtcattatgccagatgcctatattgtagaaaaaaatggtaagaagattgaacttactcaccgtgaatttgaacttctttactatttagctcaacatatgggacaagttatgactcgtgaacacctgcttcagactgtttggggttatgactacttcggtgatgtgcggactgtagacgtaacggtgcaccgtttaagagaaaagattgaagataatccaatccaacctcaaattttagttacccgtcgtggtgttggctattatgtaaaacagccgagtgaagaataataaagaaagccacagaactgttatggcaatgtcattaagttaagacattgacaattaatattagacttttaaagcactgatttaacatttaattggttaaattggtgcttttttcgtacaacaaataaggcatagcacagattctgcttttttaagctacgcgatataaataatatacagctgatttgggcttaatatttctcttgtccttgcggcctggtctaattggaatggtataatagctgatctgaataaggatccgttcaaaatcttgcgttaaagaagaagccaaatacatgctctgaataatcaagcatgattgcttgaaattgatggcatattgatacttgcaatgcttttgcggaatataggcctgtgcatcaatttgactgattgcattaaacataatcatatgggcataaatttccatttcaataaatttatcttgtttggaatggaactgtacactgcctaaagaatacttcaatttcttgaaggaggtctcaataccccaacgcagatgataaagctctttaattctttttagcggataattttttcgatcaagattggttagcacaacttcccattcttctttgcctgatttggcatcattaattctaaatttgcaggctcgaaattttattgtgcataactcgccaaaatcccagcttagatcctgggtatttttagagcgatacttaatatattggcgataatgatgctggacatggtgaatattctcactggctttatgcgtgatgtagtaatagttagaagtagttaccaggcaggaaatctcacgatcacattcttgatcaggaaatgtcgttatttctttaactccgccttgtccagccttagttcgtattatgtaatgacagttaggcaggcgattgcagttttcaatcatattgaaactagtgtagccacgatccattgttacaatatatggaccacaattcaaagctttaagcatttgaacagccgctttgcgttcatccatttctgatttaggctgaaaaatacaatcctggtaggtattattcaatagatcatataaggcattaacgtgaatttgacaatagggtttctttttatgagaagaagcttgtacaatgttattcgatttcggattccagatttgattaaagtcagagccatcaatggcaaacaaacggtagtgatgatcaaaaagttgaatattaaatagattttgattaaaaacagtcagaatatgtttaaaacaagcaggagaaagctggcttttgcgttgaacataggcagaagtactaactactttatcgttctttttagttgcatcttcgccaaaagctctaaagagttcactgtttaaattctgaccttgcatgttaattgtagttttaaggactgtcgctgcatctaaagtgcgtttcctggtaaaagcatgaggattattaataaaatcgtgaatatgatccccagtattattgataatttgatcaagacgttctagaatattcttatgaagggctttcataattaacaccatctttctggcaataattttgaaggtttaaaatatataatatataagataggcgaaaaggctggtcttttcgcctttattttatacaaaaaaagagatcgaatccaaatgattcgatctctaaaaaagcacccttaattgtcaatgtcttaacttaatgacattgactgttatggtagtggctttcttttttatattttttagatattgaatgagtagaatgaaaaaattcaaagcaagattaaatagtacatttaattccattaatactaaaattgcaattgtgttcatgctgatgctactggcaacaattgaagttattggagcttattttacccgtcaattagagcaaaatagcattgaaaatttccaatcatcaatccagattcagactatcgtcagcaatcagttagctaatcagttgaccagtgataataaaaatactaatgatcgcttgaatcaaattgttaatgactacaataatgatgcaattagtgaaattattgttgtcgataataaggatacgattcgtgccgtttctaacttaaatgataaaagtaagatcggtcaacggattaacaatactgatgtgaagcaggttatttcaactggacatcaaattaataaagtggtcgatgatcatggcaattacatgattcaaatatcgccgttgactagtggcaatggctctaacaatactgttggtgctgtctatgttaaagctagtatgcaagatgtctttaacaatttgcgccaaatttcattgactttcttgattgcgtcattgatcgcggctttattaggtgcatttttgtcattggttatttcccgggcaattacgcaaccgatcgaagaaatgcagaaacaagcattgcatattgctgatggtgattattcaagtcaggtaaaaatttattccaatgatgaactagggcaattagctaaagcatttaataccctgtccgtacgaattgaacgctcacaagaagagtctgatagtgaacggcggcgactagatagtgttctgtcacacatgagcgatggagttctagccactgatcgtcatggtaacgtcagtgtggttaatcatatggcactaaactttttaaataaaaaagaagacgaggttatcaataagccgattgctgaagtactgggactagaagatacttcgtcacaagatttgatttctagtcaaaaagagatcgttattacccttgatccaggtacgcgggatgaaattattttgcatgctagtttttctttgattaagcgggtaactggctttgtatcagggtcagtttgtgtattacacgatgtaactgagcaacaaaagaatgaagattcacaaagacagtttgtttctaatgtctcacacgaattgagaacacctttaacaagtttgcaggcttatattgaagctcttaatgagggtgcttggaagaatccagagattgctcctaagtttttggaagttacccaacaagaaactagtcggatgattagaatgatcaatgacttgttgagtttgtctagaatggaccgtggcgtttcaaaaatggatctagaatttgttaacttaaacgattttgttaaccatattcttaaccgtttcgatatgattgttaaaacagataaaaataaagaaaagaagaaatacacaattaagcgtgaattaggcagtcaagccttatgggtggaaatcgataccgataagatgatgcaggtaattgataacattatgaacaatgcaattaagtattcacctgatggcggtgtaattactgttagaatgacccaaaaccaaaatcatgttatcttaagtatttctgaccagggcttgggtattccaagaaaagatctgggtaaaatctttgaccgcttttaccgagttgataaggcacgttcccgggcccaaggtggtaccggcttgggcttggccattgctaaagaaattgtggaagctcaccatggtaaaatttgggctgacagtagcgaaggcaaggggtctactttctatatttccttgccatatgaaccgatgacagaggaggatgattgggatgaagtttaaattcaaattcggtgaatttttcttaggcttagctacactgatcgtcattgtcctctcaattgtgctttggatctttattatgactagtgatcagcgctttagtaatattggtcagcaaaatcaaaataatatcactaaagagcaaacgcgtagtcacaattttaagtcattatatgatttatatattccaactacttcatatggttttgctaatggaaatttgtgtcagctatatgattcaaaaaataatttgactttagaatttaccaaagagataaaaaaagccaaggccactaataaaattaagaaaatagttgatactagaactaaatatgaagagtatttaaacaatcccaactatgtgcagttggtttatccagatgaaattactttctccttatttaaccagttgaataatgccgcaaatgataaccgcgagtttaaccgcttctttatctcgcagtcaaatcactggatttatttgggaaatgatcagactaatgaaatttatcaagtaaaaattgctggcgcaaattttgataaactacgtaaatatgcacgtaatgctaagagcaagtatccagttagattagttcgtttaaaggaaggctattcaccgttttacatcaagacaatgaatgctaaagtttatagttacttgactaatcatcaatcgtattcttactttgtttcgcgtttattaggtacatctggcgttactagtaagactaataagaatggtcaaacggtatattctttgaactactatactcgcttaagagtgccagattctaattcaggtgagcataattatctttatactcattatgaaaaaaataagatccccaatactactaaccgcttattagatagcgtttattatgttcaccaattgggtttaaccgagcaagatttacgcttctttgatgcagatggtgctaatgttagttatctaaactatattgaagggattcctgttttcttaaataagcatgatttgcaagtcaagacgaccttttcaacagattcgattaatgtggcctttaatagtgtaaacttccaaattccaattccgtttgatggtcaaactaagcggttaaaaccaacccaagatgttgttgatgaattagtcaatcacgacctaaagcaggaagatattcaacgaattatcgttggttttgctgaagaaaaggattcaagtcaccatagtttgattaacttgatcccaacgtactatatcaaagcctacgatgaatggaagagcctaggtgaatgggaaaagcaagacgtatctacctaccgtgaagctgatcagttaactgttaacgaagggggaaaatagaaatggaccataaacgaatcgaatggctatttttcgttgttttctttttaattgatatttatcttggaatcgaaattctccgttctcccgttaatttaagtaacgctgataccactactcgtagcgttgctagcatccgcaatgaaatgaagtcagacaatattgatttgcccgataagatttcggatgcaccagattctggttattatttagctaccaagaatcgtgactatctctctggcaaagttagctcgctgactaatgtaaatgcccgctattctaaaagcgataatgtgctttatggtgaaccaagacaagcagtccttttgagtaaaaaacctaaggaagctttagaacaaattgaagattttaagaatgattcgaaaaatattccttatggtaaagaattcaagtatgaacctgatatgtcgagtgaagacaattatgtttttgtgcaaaactcagattatggtgaaatttatgctaactcggcccaattgaatatcaatgtaaaagataatcagattattaattttactgaaacatatatggggcaagctagtccagtgcgtgaattacagtcaaccatcagtgcttggcgtgctgtgcgtgcgatgtacactgatcgtgagttgactaataattcgcgcgtaacgcaggtaaaattaggttactccaaactgacagaagtacgtggcagcacaatcttgttgccaacttggctggtttgggtagaaaataagacaactaaaaatatcacgatgaaacgtattaatgcatatacggcacagatgctacaatcgagtacctataatgtagaaaagtagaagggacaaaaattgaaggtttccgttttagcaagcggctcgaccggcaataccagtttaatcgttacaggccagcataaaatcctgatggatgctggcatttctggtaagaaaactaaagatttgctagccgaagttggagttgatattaacgagattgatatggcctttttaagtcatgatcataccgatcatagtggcggactcggcgtgttgatgcgccgttatcctaagatagatgcttttgccaatagtgggacttggcagtatttattggatacgaaaaaaataggtaaattaccggctgaacaaatgaatacaattgaaccaggccaaactaaaactttgggtgatgttgatattactgcctttgcaactagtcatgacgcagctgagccgcaatattatgtgtttactagtggtggtaagcgggtcgcttttttaactgatacaggttatgtatcagaagaagttgaagggacaattgaagatgctgatgcctatatgatggaatttaattatgataatatgatgctcagagatggaccatattcctgggcactgaagcagcgaattttgtcggatgtaggccatttatctaatgacgaagcagcccaggcattagttgatgtagtcacacctaaaacaaagcatatctttttagcgcatcgcagccaacataataatacggagtatttagctcacgaaacggcaaaggaaatgctgcttgagggggatgcaaatttggatgatgatgttaagattattgatacagaacctaatcagcctacaaaattagttgaaatttagcagttttcacaacattttttcatataatattcaaatttaatcggtatgattagtaaacaagatgaggggagaagcaagtatggtagaaaatcaaaataataataacaatttacaacaacctagaaaaaagaatactaatggtaaaatcattgccactgcagcgattgtcggtgtagttggtggcttgatcggtggaggcgtttcatattacgcagctgatcaaatgaataatgcatcagttaataatggtgccgctcaaactagtgtatcttcaagtagtagtaaagtttcagaaaagagtgctaagactagtggcacaatgactactgcatataatgatgtaaaaggagcggttgtttcagttattaacttaaaacgccaatcaagttctaatagtactaattcactttataatagtttattcggtaatgatgacagtgatgatagctcttcatcaagcagcaagggcaagcttgagacttacagtgaaggctcaggtgtagtctacatgaaatctaatggcaagggctatatcgttactaacaaccacgttatctcaggcagtgatgctgttcaggtaatgctagctaatggcaagacagtaaatgctaaagttgttggtaaggatagtacaactgacttagctgtgctttcaattgatgctaagtatgtgactaagacggccgaatttggcgattctaagagcttacaagctggtcaaactgtcattgccgttggttcaccattaggtagtgaatatgcttctacggtaacgcaagggattatttcagcaccggctagaaccatttctacttcatcaggcaatcaacaaacggttattcaaactgatgccgcaattaacccaggtaactcaggtggtgccttggttaactcagctggtcaagtgatcgggattaactcaatgaagttagcccaatcaagtgatggtacttctgtcgaaggaatgggctttgcaattccatcaaacgaagtagttacgattgtgaacgaattagttaagaagggtaagattacccgtccacaacttggcgtaagggtaatcgcacttcaaggtattccagaaggctacagaagccgcttgaagataaattctactttgaagagtggtatttacattgcctcagtaaacaagaatagttcagctgctaatgccggaatgaagagcggcgacgttattaccaaggttgacggcaagaagattgatgatgtggcatcgttacacagcattttatacagccataaagtcggtgataccgtaaatgttaccgtgaacagaaatggtaaggatgtcaacttaaaggtaaaacttgagggtaactaaaaatcaaaatagaagttaattaaaagaaaaaaggctatatcacgcggtttaaacgtagatatagcctttttgttaactttttaaatgtgtaacatcaaattgttcggaattattcgttgtcaaacagacaccagcctgttgataagtgtggataactctgtggattgtgtataacttgctaaatataggtttattaacttgtggaaaaatatgatgattttgaccttatttagtgaattctatttgagaaaacaggcgttcatgcaggtataacaagccttaagagataaagtttgtgaaaaaaggctttcataaaatcgatgtgaataaagaaattttagaaaaattattaaatacaacttctggggtataagtaaaataataccacaaaatgttgaaattggtctttgaagttttgtggaaaagtttgggtaaatagtgtggaagggatgttagtattgtgctggtagattaaaattatgaatggaaaattagctatgcttgttataatagaagcatgaatatcaaaattgtatgtgttggaaaattaaaagagaagtattttagggatgcaattgcggagtatgagaaacgactcagtcgttttgcaaaggtgtccattgtacaggtgcctgatgaaaaagcaccggaaaaattcagtgcagctgaagatgagaaggttaaagagattgaaggtcagcgaatcctgagcaaaattaaagataaggagtacgtgtatgtgactgcaattaaaggaaagcagcgcagcagcgaagagttcgctaaagagattcaggatctcgcaacttatggtcattcagacattacgtttgtcattggtggcagtttagggactagcgatgctgtaaacaagaggggaaatgacttgattagttttggtaaattgacgatgccacaccagttgatgcgcgtggtattgattgaacaaatctatcgtgcatttatgattaactcaggtagtccttatcataagtagaatatagaaaaagcccataaattgggctttttatttttgcatatttgcagatttcacaagcatattgaaaaaaactgtggcaggtcagtgcttttttagttttttatgatttaaaaatagattttgttaaattatgtttggcaacaaaaaagacgatctttcgatcgccctgataatttttgagctaccagctagtagctcacgcacacgctgaagtgtactttatctttgtagtatctcaattttaacacataaatggtaaaattaaaactgcacgttgaaggggtagcgcccttactcgtgtggaaggaggtagactcccatgaagtattactttatctttgtagtagtatttctaccactgaatcgtgatggcaagtgcttcaagaagctcaagaaggctattaaaaagttcctcaagaacctgattgatagtttctttgattaatccgatccagactcaatacagccgtccttcggggcggctttttttatgatgaaaatggcaagtcattgggtgaaaagtattacgcatatcgtgcagtaactgtaaatcaaagtcccataacaattaatggcgctaaattctacaagttggctgatagggatgcttatattaaggtgaccaatattagtggtcaaggtcgcgttttaaagcgtaacgcctacatctacagtacatcaaagaaacgtactacacataatggtgcctggaagttgtacaaaggctccacagtgacaacttacggtggttcatacaagtttaagaatggcaaacgctattacagaattggcggacctgctaagcaatatgtaagaacatcaaactttaattagaagttgaatatcatttacgacagcaacataatagttgctgtttttttgcctcaaaaaccatagaaaatcttctgtaatcaaggtaaaatgaaattgattttacaaatatcatggaggatgttggaatgagaaaacgatggacagcagctgttattgctgctttagttgccgtaagtactgccgcaactactgttaaggctgacgatactaacacaacagctaatactaatgagacgcaagtaactgcaactagtgaccaaactaattctgattcagataaggttacttataacaaggcagattatttgtctgctaaccctaaattagtgcgaattaagcatgcaactactgcttataaggatgctgcattgactaaatcagcacagagcgtaaaagcaggatcacactttttaattagtcgaattgttaaatctgacaaccaagtaccaatactaaagactagtgatggcttgtatttgcctgctaaaaaatctttggtaactaaggtcatagcctaccaaaatcctaagggttatcatcaagtacattacacacaagttaaaccatacggtaaggtgggttataacttgtaccgtggctatgagggtattaagacttggaaagtaatgcatagagttggtacttgggcaggtacgaattactataaccaagctacttataacgcagtaaagaacttccaacgtagtcaccacttgccagcaactggtaatgttaacttagctacttgggaaaagatgggcttttctaagaagtcatggtatagcattgatagttatgttgccccacttaaggcttatgcttggcaagggcgtaaagctcatattgaagcaatgattaatcaagcttacaaatatatgggaaaaccatggttagcaggttgttcaactagtccaagctacggtgttgattgttctggtttggtaatgcaaggtctttatgcaggtggcattagtccagttccaactagttcaatcggccacgctcatccaggcaatgaatggaattcacgtaatctttgggctgacaagcacctaaagcgtgttccatattcacaaagacaacgtggagacttagtgttctattaccaaccaggtacgcacactatttggcatgttgcgatttacttaggcaataaccgagtaattgaaagctggccaccacgtgtgatggttcaaccaattgttaattcacaaagaaatgtaattgctggtattaagcgaccatttatttaaggaaaaatatgaaaaaatacttagctattttattagtcagcctgggctttagttcattattgttaactcgccaaacagtacatgccgctgataatgatgatgccgcggcaactaatcaatcggctcctaagtatactggccttaaaaaagttggtaaacattatgtctattttgatcaagcaggcaagcaacgttttaaaaataccaagactaaaaaagcatattattggattaataaaagcggcaagatagttggtattaataactacgccaaggtaattagccaactacctgaaatgccaactggttgtgaaattactgccgtgacaatgatgattaattttgctggtaaaaaggtaactaaacagcaggcggccaagattatgccgcgcagctctaaccctaacaagggctttatcggttcgccttacaagaaatatccgctcggctattgggttgctcctaatggggtgaaaccagtagtgaagcattatcttggtagagcacagaatatgattaattgtggtttgcccgcaattaaggataagctgattaattcacacttggtggttgtttgggtagggatgtttgacggcctctctaaccatgctattaccttgacgggttatcatgataaaacgatctattataatgatccttggactggaaccaagcggaaaatcaagcaggaaatttttgcaacgcattgggctttagatgcccatcgggcgttgagttattaattttatgtaaatatatttactttttagtcatgttgatcaagccactttcgcagcatttcaacatattcatctgttttttctacaaaagacatgtgaccgcagttttcaaatagctgccatttactgccagcaagctgatcctgcatcgttttagctacataaggtgtacataaatcatcagtcccactcgtaattagagttgggatttttattttgcctagtttttctgtgtattcgtaatcgtgcaagttgccctctggcgtatattcatttggtccccaggcggtttcataagctacaataccaccacatttttttcgcataacgcattcaggccacgttttcgtcatgtcaattgcatgttgattcatgaagtgctcattagcttttaagtaatcaggatcgttaaaattgctagtcaattcggcgcgatgaattgccgcctgttcttcaattggcaagtatttaatcatccggtgtaattctttgctccataaggaagcagacgacaaggttgaagacaagatcaagctttgaatgccaacaggatgataatcacacatgtagattagtgctagcatcccgccccaactttgtcctaataaatgtattttgcgcaaagccaagtgctcccgcaacgccatgagttccttaacccatgtttctttagtataaagttcagggtgatcatcaggtatgctactcttgccgcagcctaactggtcgtacatgataatccgtcggttatcaatttcggctaatttgtccaaaacctcaaaataattatgacttgagccgggaccaccatgtagcaatacgagtggtgtcttttcgcttcttcgaccaacaatacgatagtaagtttcatagcccatgaaaggcatttttccttcgataacttccatttttttacctatttgaacaaaaacaatgagatattaaccaaaattagcagggtaaagaagattacccaatctctagctgttaaaggaatagcgatgatcgtcgaccttctttgcccttcgacatagccatgtgattccattccttgggccagattgtcagctgaatttaaagcaacaagaattgctttaaaatagaggaccggcgaccaaaaactgagataaatgccccgcatcatagcgctagttcggatctgtttaaccgccatcttcatctgcggaataatgttaatcgccgccagcacgccgtaggcaaatttactgggtaagtgcaggttctgctctaatgatcgggcaaagtctgtagcggtgttattacgtgtcacgcaggcaatcgtcaaggtataaacatagatacgcgttgacaaattccaagcataataagcatttggtgttggtgaaaaccaaaagagcgttgcaaagattgtaaaagcagcaataaagggcaagataatgagcaagattaactctttgattttgattcgagtaataattaaataaactagcgcgaaggtgattactaacaaattagtaactaagctagcttttaaagatatttccagggaaataataaatgctaaaagaaattttaaactaggattcataagcttatctttctacatattttaagcgctgatccgcaaaaatcaggtggtaatcgcaaaattcagctagctcgtctatctgatggctaatgataaaaaacgtctggtggagcttttgctggctttctcgcattaattctaaaacgagtttgaccgagttatggtcaagtccactgagcggttcatcaattaataaaacctgatgcttagtcattagcattaatagaatctgtaatttcttctgttggccacctgagagagaataaacaacttggtctaagtgtttggctacccccaatttatctagccattcattgaccttttcttcagtaaaaaataaatttctatcctttttacttaattctagttcatctttgacagtcacagctaaaaattggtcgcttgctttttgaaaaatttgagctacttgtgttaaatattttctagctgagatttgagcgatttccttatttaaataagcaaaattaccagtatacggaatcattttggtcattactttaaataaagacgtcttgccaacaccattagcaccagtaattagggtagtgccagaatgcaaatttagctcattttgcttaagcaaaagcttgttttgtctaatttggacttgttttaaagtgaaaataggctcactattaggtaagacaaaatgataatgtcgctcatgcaattttttattttgttcaaataaggctatttttttgctagcatttaattcaataacttcttgattatttgtaaactcaaaaagatggtcgcagacaggttcataatcgtctaaaacgtggtcacttaaaataatagtttttccgttgtgagctaaaatcgctaattttttaatcaaaaaagcacgtgtcttaggatcacaactggcaaacggttcatctaagagcaataaatctacatccatagctattaagacagctaaagcaactcgttgttgctgaccgcctgatagagtattaatcttttgatcgagaaggtctgcaatttgggtgaaagctgttgcctgatctagtcgtgtttgatactcaccttcatctaactgtaaattttctaaagcaaagacaatttcttcacgtggagttggcattgtaaactgttcagccgcattttggaacatcattgtcgccttttgtccgtgcaggtccaccatacctgttagtcgccctgcatatttgggatacaaaccagcgataattttgagtaaggtagatttaccgcagccggtcggtccaattaacagagaaaaaccatggggaatttcaatatttagatgattgataataggttctttttcataagaaaaagtaagattgttaacggttactttcataagcttgattgtacaagatgctttggggactgtctacaggtaaagtttgttataagtagaacaaatcataaataatacttaatactaaataaagttttgatttataatgtaattatagtgttaccatattttatttaatttaaggaaggtggacatatggcagctgttgctttggaccaatatctggcaagtgtattaaagtcaaattcaacagataagaatgaaataaagttggaagctggtaatccagattttgatctgtttactatctaccttgaaaatcataatactggtattcatcgctatcggatggatgtttcaacgattttatatattgctaagggtactgtgacaattaagagtggtgaaaagatcattcaaatgaagtctgggaatgttttgctactgactgaaggttgcaagtatgagattttaagtcaaaaacctgatacggtactgataaagttgaagtttaagcgtggatttctatatcgcaagtattttaaagattttagctgtaagggagaacgtgaggttaaagttattgagcaaatcgttgatagcttagaaaatgaacatgttctttggctaaaaaataatcaaattactcgtgcttctcaagtgatgcaacatattattggcggttatttgaataatgatttgtttactaaagctttaattcaggctgagttgaccactatgttgattatttcaattagaactcagcgcatggcaacaccgactagtttggataaaactaagtttgaaaagaagaccttagataattacatcgatcttcattttgccgatgtctctttatctgacgctgcaaaatactttggcttcaatcctaattatttctctaatatggttaaggctaagactggcaagagttttgtggatcacgtggatgatcgaagaatgcaagaagcgcgtgaattgctggctcagcctgatatttcacttagagagattattggtcgagtcggatattcgagtaagtctttcttttataagaaatttaatcaatactaccacataacaccagcagcgatgcgggcagaattgtttagacaagcaaatatcaatttaaagtaaaaaaataatctggacgaaagttccagattattttttacatattttctaagcgtttaatgcgctctgctgttggtgggtgagtatcaaacaagtgcgtcaaaccgtgattgtggaatggattttcaatatataatccagcactactactatcagctactttcattggttggctattttcaatcttgtgtaaggcagaaattaagccttgcggattacgtgttaatttaactgaagatgcatcagctagatactcacggttacgtgataaagccatttgggccaaggatgcagaaagtggacctaagatcaaaacgaagaccaaggcaaccactttaaaaatcatggctaaagcattactgtcacggtcatcgtcgtcatcactgcgcacgccgccccagaaccaaaaattggacgccatattagagataaaagaaatgaccccaactaataccacggcaattgttgaaagtaaaatatcgtagtttttcacgtgtgataattcatgccctaagacgccttcgagttcttcacgatcaagtaattctaaaattccttgagtaactgccaccgcactatgttcagggtcccgaccagttgcaaaagcattgggactaggatcaggaataatatagacccgtggcattggaacctgtgccaccatcgccatatcttctacgatatgccacagttccggattgtcggcttcatgaatttcttgcgcgtgattcaagctcataatcatgttggctggattttgccacatgatgaataagtagactaaactaccgatcaaagcaatagtaacgcccattgttggactattgctccaaagataaccgattcccgcaccaactaagcctaagatcaccaaaaagatgaacataattaacgccgttttgcgtttattacgagcaatttgttggtaaagcatggttaaacttccttaaaattaaaacttaacttgaggcacattcttttcttcactaggagtttctaagtagttaatcttagtaaagtggtgccacttggcaacaatatttgatgggaaagtaagcaacttttgatcatatgttgctacagttgaattataaagttgacgagagtaagcgatcttgttttcagtgttagtcaattcttcttgcaattttaagaagttttgattagctttcaagtctgggtaggcttcagccaaagcaaaaattgacttcagagaatcagtaatttggttagaaagcttcatcgcttcttcatggttaacttgaggcacattaaccaattgattacgtaatttgactacttcctcaaaagttgatttttcatgcttggcatagcctttggtggtttcaaccaagttgggaattaagtcattccggcgcttaagttgaacgtcaatttgactccaagcttcttcagcatagactttcgctctttgtaaaccgttgtaagttacgatgtagatagccacgattaaaacaataatagctaaaatgatccaaattaaaggtgacatagtttttcctccataaaatatttatttaattttatcgttttcgaatttcttgagcaataaaaaagaatgtcaaagcggcattcttaacaaaaaatattaaattctgaagattaatagtaataatccgactgcagttaaaataatcaaaccagcaaactgcataatggtccattgaatgaaaaatttcttcttgtttacgctgccgtgttgattgaaagtcttaagaactaacatgttggccattgagccaatggctgaaccaaaaccaccaatgtttgaacccaagaataatgcttgagcataagtagtaaatttaccaactaaaatggttgatggtacgttactcattacctgactggagataattgaagcgaagtaagttgaaatttcggaataaacagtaccatggattagatttacgataacagggatttgttggatatcgctgatgaagatgaagaaaccagtaaaggtaagaagtaaggcgtagtcaattttaagcataatccgaggattaattgcgagggctaatgcgattgatgccaacattggccaaataatatcaatggttctgaaaacaccaaagaagaagaaaataaagacagcagtagttatcagcgtcgggcgccagctgatcttgattggctcagctttttgcaccggaatttcttctttaggaataaacagaaagactaatcccatgattagcattgaaactactagataaggtacagaccattcgaaaaattttaatgggctgacatcaaagcggctgactaagaaaatattgtgggggttgccccaaggcgtaaatgctgccccaatatttgctcccattccaatcaaggtaacaggcaaaatttgtggcaatttataacgcttagcaatatttaaatacagtgggatcaaggtcaatgcagtaatgtcattacctaaaaacatccccgaaatgacagccaacaacgaaaacagcgtgttcaacttacgcgtattatcggcaatacttgtaagcttgtacgctaaaacatctgcaagtatgcatagatctggataatcgttaacatcgcggcaacagaccataatgtatggaaattaatgtccgcaaaccgcggtttagcaaaaaaaagactgactactgtaatgatcacagtaatctgtaaaattctatctttagcaatattctttaagacggtcataaaaggtcccccttacgtattacaatcgtctaaaaaccctatgtaccattttgagcctttttgttattgcatgcaatgataaatttaaaaaaatatcaagattagcggtatttttgagcatatttttagttagttggaactagtcgtgctatacttaaataagtaagttaataaaatttagattgaaacgaggaaacaaaatgacagagaatgcaatttcaatcaatattaaaccagatgctgcagaaatgattaaaagcaagatggatgcagatcaccaaattgttatcttggctttagatgatggttcaaccaagtattctaaaaaaggcggcacttgtactattggcgacagcttccagtttgtaatccttgctgaaaaagatcctaagtataatattttaatcgaaaataatgctggtcttgacttgtatactgctcagccggaaacaactttctttgaaccaggtctagtggtaaatgcacgcaactcaactttgagtttatcttcagacagcggcattattgatggtgggatgaccgttacccaatatgaacctgaagcaattactgctgatgatctaaaaaacggcggtcaatgttaaaaaaataaaattaatcatagggacgagggaatgacctcgtccttttttagtatagaattaagaaagtgatttcaatgtaaggggggaagaacaatgacttttgtcaaagaaataaaagcaggtagtcgtgaattttgccaaaattggctgcggtatctgctactttttatgggattaagtttatttaatcaatttattgttattccactttttcgctatattacaacctttgttttgcaggctagtgctattccgttcgtatcttatcaaaatgtagtgacgatcattacgacgcatacggttgcctttttaattttgataattgagttgctgcttttattagtaatcttgtatgcgcaattagcttatttacttcatggcgtttgggatattaagcatcaagtttttacgtggaaaaatagttttattcaaacttggcaaaatatcaaaaaaattcgtttgggcacgctttttattttgatgctctattttttattggtagtaccgttagccgatgtcatctttagaacaccacttttaagcaaagtgcagatttcagaatttatcttggattatctgacgagaacgccaatcttgttagccgttttgattgcgttttatttagccgctttgatccttggtgcaaggctagtatttgctttacccatcatcgtttttgaccacttaaagtcagtgcaagcagtaaaaagaagttggcgattaacggcgcactaccgttggcggacgatttgctggaggattattgttttagccgttttatctgcagcagtcatgacaattttctatttagcaatgtattgcctgcagctattagttgatttattacctgggaaatgtccgttaattttagccattatcaatctttcgcttgttcaaattattagtgaagtagcgttagtctatgttagtgtactgggcttatctattattttgaaagctttaaggcaagaaaagataagtcaaacaggtaaaactaaaaagataattctaagtacattagttgtgtttgtactagtaatgattaatgcaatatccaccaattatttatatttgactagtgtaaatgctaaagcgccagtaattatttctcatcgcggcgttgatgataaaaatggcgtacaaaacacgttacagtcattaagaaaaacggctaaagaaaagccaaactacgttgaaattgatgttcatgaaactaaggataaaaaatttatcgtaattcatgatgagaatttattgaagctaacgggagttaataaagccccgaatgatttaactttacggcaattagaaaagttaactgccaaagaagacggctatcatgctaagttagttagctttgattaatatcttgaggaagccaaaagactgcatcaaaaattgctaattgaaattaaaacgacggctaaagattcgaagaaaatgctgcagcgctttaatcaaaaatatggcaaaacgattcttaaaaatgcgtatcaagtacaatcactcgactatcgcgtggttgaaggactgcacttaattaatccacgtttggttgtcttttacattcaaccttataattttacttatccgcaaagtgttgctagtggatattcaatggaatattctaccttgaattcagactttatttggcaagcccatttgcaggatcgtcctgtttatgcctggacagttaatgacgaaaaattaatgaagaagatgatgtatcaacaagttgatggcttaattactgatcgagttgatttagctaaaaaggcaattaaaagtttccaaaaagatgctagttatgctacgcgaatcttaaattatattgttgtcctgcatctgtcgaaaaattttgaatctgcatgaagacttgatctgaagggctggacatggtaaactatactagattttcgaaaatctgaaaggaagtatagcatatgcgtaaaggtgaaaattacaacactggttgtgaaccaaaccaaagacctaagaacaagagaaacgcaaagaagcgtgttgctcacgtagcagcagttgttgctttcttgaacaaggccgcaaaagatgaaaacaagtagtctttaataatattgaaataaaagctaggagctgacgcctctagctttttttgtgcttactgaaaaaattaattctaagtgtataattttttacggtaagttgaataaataattaaaaaagcccaagtcctttgaatttggacttgagctcaaacaaaaagaccagtagtctgatgttaagaacaaaaaacacattagaagctggtcttttatgaattcaattgtaactgaaatcgcaaatattataaagtctgaagataattatattaagcgtgaaagaaaaataatctgtttcttcttaaacctgattaaggaaatcatggccttggctttagctaaagttgatgatgaaatgattaccaaggttaaagcacagcaagttcttagttaaaatcacgccacttaagcgttacccaaaagttacgttagttgtaccagctcataatgaagaattagttattagtaaaactacgcaggcaattttaaatttgaattatccggctgataagttacaaattttaatctatgctgataattgtactgatgatactgctaaaattgcccgggaaataatcaagcaatatcctgaacggaaaatcaatgttcaagtaattgaacgaacaggtagtggtggcaaagctggtgtattaaatgatgctttgaagattgcccaaggagaataccttggtgtatatgatgcagatgccatgccagaagaaaatgctttgtattttttaattaaaaagattttggaaaatccggtgagatataaggctgcttttggtcgcaataagacgagaaatgcgcggcagaattttttaactaagtgtatcaatcaggaaattgttgttacccagcgaattcaacactgcggtatctggcaattatttaagattggtcgtattccagggactaactttattattaatactgattatgtcagatcaattggcggctggcgcaatggcgctttgaccgaagatactgatatttcttttaaaattatgggctcaggtagtttgattgccttagcctataattctgaagccttccagcaagaaccagaacgcttaaaagattattatttccagcgcttgcgttgggctaaaggtaactatgaagtggtgatcaataatttttgccatctttttgataaaagcaactggcgggttaaattagagactgtctattattcctgcacttttttctggtttaatttggcgattgttttatcagatctgatctttttttctaatttgattgccttaatcgtccatctttggaatcctgcagtagtaataccatttacaatttcgcggagtaatattttattagctcaaattctgctctttaattggctattgatggttttgctttatattttgcaaattaacctagcgatggctacgcaatatgggcaggcaactgacgaacagatttggctagccttagcatcatattttacttattcgcaattgttcatcattgtatcaattcatgcggttacttcagtaatgctagatcgcgtttttcatcgtgatagtactaaatgggttaagactaagagatttgcggattaggtgatgagatgaaaaaaagatggatgctactaggatttttactcgtaacgattgcatttaccggtattatgatctatatcagagcagataataattcagcggtgcgtaatttttttctacattcttggcataaaaattatgtagttgaagaaaagaatcttgcctatattaataccacgcctaagcaggaacaagtgacggttttatctgaaggccaaggatatgggatgtttattgcggcgcatgatccagcagttaaagaaagcaactttgctaagctagtgcagtattatttaaaacaccgggatcgtaatacgcaattgatggcttggcggcaaacaaagaaaaatggaaaatggagcagtgaacgcaatagcgctactgatggggacttatttattgctaaagctttgtttttagcggctaaaagatggaaaaacccagcatatcagcggcaagggcaaaaattaattgccgatattttgcgttatgaatataatccgacaacgcacgctttaacggtgggcaattgggccgattctaagccgaagtattataatttaatgcggacttcagatgtattgccgacaatgtttgatcaattttatcgtgaaagcaatgattcgcggtggctcttaattaaaaaaacaatgctcaagcggctcaatcagttgagtcaccagcataagagtggcctagttccagactttgcctggctgacatcaaaagatgctaagccagttaaaggaagggttaccactgatcgatatgatggtgattattatgccaatgcttgcctggtgccaatggatttagcatttagtaaggataaattagcaaagaatactgtacatcgcttgcttaaattttttagcaagcaaaatacaattacagcaggctatactttaaaaggcaagccggtcaataattatcaatcagctagctttagcgcgccaatttatattgcggtgaatgaaaatcgcaatcaaggctatgataatttgtttgcttcgcagcaatatatttttgctaaaaaattaactaaaaataattactatgatgcagcactaacgacgatggcaacgatactgacaccggcgcatagattttaagaggcaaaggcctctttttatttgcattgaaaatcaatctttgataacatagtaaaaattttaaggaaaatgaggaggacaaaaaatgggattaaatgcatacattcaaggttttaacagtttagagtcaattgatcgagcaccgggctacttcaagtatcatcaccactcagtagctgaccactgcttcagaacagcggaattagcacaaatgatgggagatattgaagaagtaaagggcaaaaagaagatcaactggaaggctttatatgaaaagagcttaaatcatgattatactgaacgctttatcggtgatatcaagacaccagtcaagtatgctactcctcagcttagaaagatgattggcgacgttgaagaaacaatgacgcataaatttattaaagatgagattccaaaggagtttcaagaaatttatactaagcgcttatcagaaggtaaggacgatactttagagggtaagattttatcaatttgtgataaattagacttgctttatgaagcatatggagaaattgaattaggtaatcctaacccagtttacatgcagatgtttaaggaaagtctggaaacaattaagaagtttgatgacttagtttgtgtgcaatactttatcaagaaaattttgcctgatttatttaaaggtgattttgcgggaaaggataagatgcaacggatagcttttagtattcttttgttaggggatgattaggtgaagtttttatgtagttcatgcggtttacgcatggactctttgcattttaagcaagaaggattgatgaatcctaagttaactagtatttgtgatatttgcttaatgcgtgatcttaagccggaagattatgcaaatgatgcggtcgcagcttttgctcaaagcttgctttacacgtttgtcggtgcaaagaaacaagatcaatcaggttttattgtgaaaaataaaaaggaccgtaaaaaatacgaggcctttttacaagattatgatggcaatgaaatcgcccgccaacagattaaaaggtctgatttgaatttggcggtaattaaaagcgaagatggcaagcttaattatgtgcctaaccaaggcgtaacttttgagcaaaatttaaagggaatgggtttggagatcaatttccagttaaacgaagttgattttattgatcgtgaacgcattcgggccaagtataaataccgctgccaatattgcggcagacgtggccacagcgtagatcataaggatcccgtttctcttagtcacaacaacagcttagataatttaactttagcttgtgcggaatgcaaccgaattaagtcggatatgccttataagttgtttattcaactgaatgatcaaatttctgagatcaataaaaagctagttaagtatgaagatgcgctgggtactttgagagaagaatttgagcatcgtcggcgctatttagcggctcaagtacaccttaagggtgtgatcaatgatcctgagctaaatgcgattagaaagcaaaataagagcttacaggatgccattgatagtttacaaagtgattatgatgatttgcgtcaaacgcgcaagacgtattttgatacgggctggaaattagctcgcattaaggaaaataaggatattatttaaaacgtaaaaagcgctattttttgtaaatagaagataaaaataattctgagtttgcaaaaaatagcgttttttttgtaaactcaattcaaaatagaaaatgagttttaaaaagatcatccccatataggcaatgtcattaagttaagacattgacaaattgaatctaatctctgtagaaccgaatcattatgatttggttctttttttgcataaaataaaggcgaaaagaacctaccttttcgccctctgattaaattattaaaccttcaaaattattgccagaaagctggtgttaattatgaaagcccttcacagaaatattttagatcgtcttgatcaaattatcaatgatactggaaagcatattcatgattttatcgatgatcctcatgccttcactaggaagcggtttttagatgcagctacagtcattaaaactactattaatatgcaaggaaaagatttgaccagtgagttgtttagagcttttggccaaaaagctattaaaaataacgataaagtagtcagtacttccgcttatgtccaacgcaaaggtcagctttcacccgcatgttttaagcatattctaactgtatttaatcagaatttatttaatatccagttatttgatcataaatatcgtatatttgccattgatgggtctgattttaatcaaatctggaatcctaaatcagagaatatcgttggaaatctcaatcataaaggaaagccatattgccaaattcatgttaatgcactctatgacctgttaaataatacttatcaagactgcatctttcagcctaagtcaaagatggatgaacgtaaagccgccgttcaaatgcttaaaaagctaaattgcggaccatatatagttactatggatcgaggttataccggctttaacatgattgaaaattgtaatcgcctgcctaactgttattatgtcatacgtactaaaacgggatatggcgcatttaaggaagtagctgagttgcctaatcaagagtgtgataatgatatagcttgctgggtgactacctctaattattattatgaaacccataaggccacagaaaacgttcatttggttaaccatcattaccgtcaatatataaaatatcggtctaaaaataccaaagatggcagctgggactttggagagttatgtacaataaaatttcgtgcctgtaaatttagaattaatgatcctaaatcaggcaaagaagaatgggaagttgttctaactaatctaaatagagccgattatcccttaaaaaggatcaaagagatctaccatttgcgctggggcattgaaacttcattcaaaaagttgaaatatgctttaggtagcgtacagtttcattccaagcaggatagatttattgaaatggagatctatgcccacatgattatgtttaacgcagtcagtcaaattgatgctcaagcatatgtaccacaaaaaaactgcaagtatcaatatgcgatcaatttcaaacagtcatgttttgtcatccaggctatgtatataatttcttcttcaactgaaatctttaaaaagattcttattcaaattagtcattacacaattccgatcagaccaggacgaaaagacaaaagaaatctcaaacccaaatcagctgtatattatttatatcgtgtagcctaatttctaaacaagatttgggtttatttggcatgaaaaaagagcattcaaatgcgataaatcgcaaatgaatgatcttaaaagtccaagtcgataatttttcaatgtcttaacttaatgacattgcccatataggaatgatctttttaatttttatctatctaattcgatcttctggatcaaataaatatttgtcccatttaacttcattttgaacagtagggtggaagagcaagaatgctagcaacagttgaccaacgtaaggaattacgcccagccaccaccaaccaccgttaaagcctgcgtcgtgcagacgacgaacagtgtgacctaattgtgctaaaaaggcccaaatagctgctgcaataaagaaaataataaaaatgatgaagattacaccgattaccttggcatcgccagaatcaaattcagtaacgctgaaaggagctaaaagcatgaaagcaagtaggtaacaagcaagtacgccgattgtcatgataacttggctaattgcagtacctacccagaatgaggttctagtagatctagcatcccacttaaagcagtcaaagaagtgttccttcaagatttgaccaatagttggtacaggaacattactttttgcgccacccttaggataatcttgatcgctgaacaagtatttgccccacttaacttggcgttgaacagatggctgcaattcaagataaaataaaaacattgcgccataaccagtgaaggcagcccagtaccaatagccgctgtagccaacatcgtgcaaacgtcggatcgtttgtcctaatgcagctaaaaatagccacagataaacaacagccgcaacaataccatcgactattctaatgccggggttgatgttttggttaaaagcatagaagccaagaaggatgcataagatgccgataacaagattaatcaaagtgctccaccagaaagatttacgcgtagttcttgctttccagttgaagggatgcaaataagcctcgttcaaaatttgagcaaaactttctgcaggcggcagtggcagactttcgtcataaggcttgataaaataatatactctatcattcattttacttcctccaaaaattaatttgttataaattatacgctaaaaaagccgtgaagcaattaaacttcgcggcttttttgatattagaattcattatttctaaagttgctcaagaacttttgcgtcttttcattcttaggatggtcgaataattcttccggtgaaccttgttcagtaatgataccgtcactgatgaacaatacacggtctgaaatgctcttggcaaagcccatttcgtgggtaacgatcaccatcgtcaaaccggttgtagcaagcttttgcataacgtctaatacttcgccaaccatttctgggtcaagggcactagttggttcgtcgaacaataaaacttctggattcattgaaattgcacgggcaatagctacacgctgttgttgaccaccagataattgttgtggtttagccttgataaatggatccataccaaccttttctaggtttttcatggcaatcttgcgtgcttcgtcttttgaacgcttcaagactaattcttgaccgaccatacagttttctaagacgtttttgttttcaaataagtcaaattgctggaaaaccataccgacctttgatctaaaggtgttacggttgtagccgggatgcaagatatttttaccgtgaaaatcgatctcgccgccagttggttcttcaagcaggttgatacaacgcaaagtagttgatttaccaccaccagaaggaccaatgatcgttacgatttcgcctttattgatgtcaaaggaaatatcctttaatacttggtgatttccataagacttttgcatgtgctttaagcttaaaattacttcgtttgattcagtcattaattatttgcctccgcatcttttggagtaccaacttggacttggttagccatcaagttgtaattcttattaccttcaagtctcttttcgataaagttgaagattctagtaatagtaaaggttaagatcaagtaaattgctgaaatcattaagtaagttgggaagaacttgaatgattgactggcaatagtagtaccaacgaagaacaattcagaaactgagatgatactcaatactgaagtatccttgatgttaacgataaattcgttggtgattgatggtaaacagtttctaatagcttgaggcaagatgatatgccacattctttggttgtgggtcataccaagtgcactagctgcttcgaattgaccttctggagttgaaataataccaccacggataacctcagctaagtaagcaccagtgttaattgaaacaataatcaaagcagctacagttctatttaaattcaagtgccagaattgggcaataccatagtagattacggctgcttgaaccatcattggtgtaccacggaagatttctacataaacagataataaccacttaactacgttcaaagtccaacgcttgccgcgagtagttggagtaggaatggtacgaataattcctacaagcaagccgataaagaaaccaacaatggtaccaactaaagctaaaagcaaggtcatgccaatacctgacataatcatgccaccatattgcttccaagtagtaactagccagttttctttcttagtttcgttaccagccttaggttgttccttgatggcttgtgacattaattgatcacgctttttattagaaatagttcttaaagtagcgttaacttcatttaaaagcttggtattaccctttttaaccccgatactagttacggaatcgtcatggtcaactttgaagccagccattttgtttaagttaactgcaataatgttagggttaacgttgtggtaactttcaaattcaatatcttcagcaacataaccatcaatggtgccagaagctaaactttgacgcatggctgagaagtcacgcatagctggttcacgcttagcaccctttaattgcttgattaaatcatagtgcaaagttccttgttgtgcagttaacttagcacccttgaaatcagtcaatttcttagcgttagaatacttgcttgccttgttagtaattacgacaaaagtactcttacggtaaggttctgagaagttgattgccttgcgtctttcagcagtaggagacataccagcaataatcaagtcgattttgcctgatgtcaaagctggcaatagaccatcccattgggttttttcgacgattacttttttgtgcagtcgtttaccgatgatcttggcaatttgaacatcataaccattagcataggagttagaaccatcaattggaacagcgccattagctttggttggctgagtccagttgtatggaggatagtttgcctccatacctatttttaacgtgccagaatctttcttagcagcttgagtctgattgctactaagagaaaaaccgataaataaactgagtaggacagacattattacagccatccatctaaatcttgacttcaattataaaacctccaaaaatagttttaacataaagccaacacaataaagagtaaacaaaaacctcgctcttccaaagaattgcgagggtcataatcatcagtgtttaaaccaaatcttatagcgctccctggggactaaccaggacagtctatagaatattcttctatagcccaacagattaacacgcgaatattaaatctatttcggcggcaaccctaagttaactatcattgttttcgcgaactcaaacttaacttgtgattgtcgcaacctctattgcattggaaaaatatttaactaatgaagaatactagaagaaaaagttaaatttgtcaagcccaaccattattagtttcataatttctctttttcatatcagaaacataaggatttcctgctacataaaaacgtaatttcttgttagcccaaacgggatcagattgattgataccaacacgcgctgcagcaattatttcctggggaatttttttatgacgatcatcaagatcaatggcgaaaggggagtctgataaaaagtgcaaattccaattcttatcatgaataccaaaagcttgcatcatttttgcgggaccattagtcaaaagaacgccatctttaccatgacggttcttgatcatggtctcaattcctaaagtgggatcgattgcacggattaaaacaccctgtggttcattctgaaccctagtggcaacatcaaagaaaaaatattgacgttgcgcgtagatatagatcgttccgcctttgccgtaaagtccttcattcgctgggctacgacgaccgccataagaatgtgcagcgcgatcctttttacccatatatgcttctgcttccacgatatagccgcctaatttttcttgaccattatcaaaagtaagcattcgcccaattaggtcttttgcaatataatcggtagtgttagtagaaaaataagttgaataattcatttttgacctttctagaaaagagataaaaaataatgacagaaattaaattagttcgaatttatgaccatgagcaacctgctggttatcggattttagttgaccgtttatggccacggggaatgagcaaagttaaggccgatttagctgaatgggataaacaaattggccctagtaaggaattgcgtcagtggtttaatcatgaagataaaaaattccctgagtttaagcaaaagtatattgaagaacttaatcataatgattatacagcggaatttttgcaagatgtaaagaagcatttggctaaagaagatgttcttttcttatttggtgccaaaaataaagagcacaaccaagcagttgtactcaaagaatatgtattaaatacgctaaacagttaaatatgtttgtgaccgtgttttttaactttccaaaagtggaagagaattgtcaaaattaagatcgcaaagacaataattgcaaaaacggtgtttggcaactcaaatctcaatggtggcagagctagtagcaattttaaagcgatgattcctatcaataagtaagccattggctgcaattctggaataatatccattaatttaatgataatttcggcaactcctctcatacagagaataccgatcatgccaccgattaaaacaacaacggggttatcagacacggctaaagcagctaaaacagaatcaattgaaaagacgatatccattgattcaattgaaataaccgtacgccagaaaagagatagcacatgtctctttttctgtttgcctttgtggtgagctgcttcgcgctcttctttttctttctcatgttcggcagcttgtttagggtggcgttgatcatagaagaatttaaaggctaggtaaaaaagataaatactaccagctaatttaatctcccaaaagttgatcagataagtcccgattccgataacaataaagcggaataaataagcaccccacaagccataaaccaaggacttgcgttgttcagctttattaggtagcacctgtgtctgtgcggccaaaacgacagcattgtcgactgataacaagcattccatcaagattaaagtcagaatgatcatccagtctttgccactggttaggacatgtaaccagttattgccatcaaaaaagggtgcatatagtttaagaattgacatgtagctgcttcttttctaatttaattaatctgattttttctttttgtcccagacgataagtcccaactttattgttggataaaataactctttggtcaggaataaaaatcaaaacagggtttaatgctacggcgtgtgcaactgagcgagaagatgtggcttcggctagtgaattggcgacgtcaccataagttaacgtcacatcataaggaatatgttggacaacggctaatacctttcgttgaaattcagtgccgaattccgaaatatcaataggaacatcaaaattctttctgataccagcaaaatattcctttaattgtttgatataaggtgccatctttttagggtctcgcaccaacatgcggtgagggtagaagctaaaaataggtgaaacagtttcatctcctttaagtccgacgtaagttaggccggcttctgaagctgttaaaaagtaggtccatggctcaattgtaacgtaatcatagtaaaaaaactctgtcatgtgtaacacctttattaaaaataattagtctaagaataacaaactaggaaagttaattcaaattctggaatgctgttaatgcatccccaattatttgcgtgacaccaggggtaggaatttctgtcttgttgatagagtaaattttggcgtatcctttgcgataagccaagagctgggcaaaaggataaactacaaaactcgtcccacaaatgatgatcaagtctgatttttgcattatttcaacggactggtttaatactttcggatcaatgttttcgccgtataacacaataccggggcgaataattccgctacaatctttgtgtaaatagcttttagcatattcttcataagaaacaggttgatgacatttagtacaataaatattatataaattgccatgaaattctgttacatgttgattgccagccttagtatccaaagtatcgatattttgggtaattaaattacctttttcattacaaaaatgggcgattttttcatggattaagtttggtttagcagtaggaaagtacatgttgttcatgacaaattcatggaaaaattcaggtcgattgaatagcgtactatcgctcagaatagtttcgggactttcttgcacgccatcatagattccgtttttagagcggtagtcagggatacctgagtgggtagaaacaccagctccagttaagaatacaatatgttgggcattattaatatctgtttgtaattctgctaaatccatcatataatgtcaccctccgtgaaagtcactactttaattataaatcattgttttgttataatgagtaaaataactaaattgaagggatttttatgaaatatatgacgtatttttatgtagcaattgatattttattagtagtttatgcttgttatagttggtattggcaagctaaagttgattttcgtggtcgctatcgtatctcctcagttgtttgggcgctaatttttatctggctgggctttacatggaattacattgaaaaaggtgatccaggcctgagcgtcttcttggctctttttatcttaattagtattgtcgatggtttttcaggatttagtaaaaagcggatggtcgtttcaggctacttcaagcgtacagttaagtatgatgatttagccagcgttactttaatccagatccccaaccaagagaagccattagtgatggcgatttttcgaactagcgatggtaaggcttatatgatgcgctttaataatgaagttaatagcgtaattaagcaattacaagaatatgctggtcgagaaattcctgttgaagttcaatcaatgatgtaattacaaaattggagaaagcattcgcgagaatgcctgccaagtccgcaatgcgcgactttgcttttttatttcttccttagttagtaaatgcgagtgtttcatatcttcttcaaaagctgccaccattttctggttgaactttttatcataaaaaacggcattatcttcaaagtttaagttgtaagaacggaaatcttgattcattgaaccaactgaagaaaaatggtcgtcgacaatcgttgttttggcatgtaaaaagccatcttcgtagatataaattttgacacccaagcgagttaattcgttggcataccactgtgtggcgcgataaataaaggggtggtctggcttacatgggatcataattcgtacgtcaacacccgatgaggcaattgtttgccacgtagcaaaaacggcatcatcagggattaagtatggtgtttgaatccataaccgtttgcgtgccaaaagcattagccgcatcataccgttacgcatatatggtgcataacgatcaggcccatctgaaatgatttgcgttgcaacgtcgcctttgtggatgtttttttcatcaagatcaggaaatagagtggaattgaaacggatgagctgttgattattagtgatagaggcgttccagtccatgacgaaacgctcttgcaaaagcagagaggcagaaccaacaattcttacctgactatcacgccaatgaccaaacttctttttttggcctaaatattgatcaccaatattaaaaccgccagtccaagaaattcgcccgtcgatgacaacaatcttgcggtgcaagtggtagttaatgcggtaacgggtgatcatgttgcgtgaagtgacaaaaggcaaaacttccccgccagctgcccgcaattgatcgaaccatgctttagtagctcccattgaaccccaggcatcataaattacgcgtactttaactccttgttttgcttttttaatcaatagttgcaaaacacgattgccgatattgtcgctataaaaagtgtagaactcaacattgattatttccttagctcgtaccatgtccttaagcatgtcatgaaagaaggtttcaccttcggtatagagcttgacctgattatttttagttaggggagcttcttgttgatggttaaaaaagttaattgctatattaccagcctttgaagtgtcagaaggactagtatttttaggtgctttagcaatcgatttttgaacatttctcaagccaatgtgtttttgcttattgatggcaaaaatattttcctgggaaataccccgaccaaagaaggcataaagagtgatcccgactactggtaatactaacaggatgattaaccaagcccaagtggttgaaacggatcttctacggtggaagacaacgtagaaggctaagattgtgttggtaatgataatgattctaacaaagtcatgccaccagatcataaactcctccaaaattaaactacttttttaatttaagaaacttgtcaataatatcgattacaaacggattgtcatgcatccaactatgttcggcgtcatctttaccgcgtacttctacttcttgataaaaatgtgcttttggggcaaggatatagcgaatgctttttgcggaaacaacagagatgaatttatcagtatttgtgttatctaaaacgttgccataaatattcaagaccgagatatcaggattgaatttgcgccgattaaaaaacaaataaaggtagtgcgggttcatgacactaggccgaccactttcggtcaaatagttgacgtttgggatatcgcccaagtaagtgaccccgtcaaaaggaccagcgataaaggcacatttttttaaatgtgggaacgttttgctgcggtagtgcttcatttcagtgcgaataatacatggacaggctaatgaatgagcgactgcaatatagtttttaaaaccatatcttttagctaaaaagggcaggacgaagttgagataatagtcgatgccatagataccgactattcgctggcgaaaagcaacctgcacgataggatgcttgtcactagtccaagttccttctaatttgaaatttcctaataaatcaacggttacctttaaaaacttgggattgcccttgtcataagtagcgtgtttcaccatcacgcgagtggtataatcaccgccgcgaaagccatggaaataaataatgggtacttgttttagatcgcttttttcaatgtttgccttattttcaatatggcgcttgtgtaatttgaggaaaattcgcgtgggagcgaaggtggccatcagccccaaagaaatcatgttaaacatgctaggttcttcttggaggtcatgtttatgatctttttcaacttcttcagcatatttttttgtgttgaaaaacatttttaccaccttctctttcttttttcctataataaaagttatgcaataagtatattttaccattgggtaaagattttggaattttagaggtagaaatgaagttttatgcagtcaaaaaaggacgtactccgggaatatatcggacttgggatgcagccaaagaacaagttgatggcttctctggcgcggaatataaatcatttgaacaaattaccgatgccacagattacttagattggaatgcccaaactcagagcgatatcttgcaaaaaggtgaagataatttacaaaacgccgtaaaaagggtgcaacaaaagagccaggaaataaaaaaagcaccgcgaaaaaaggcgaagcagtataaccatgttaatagcaatcctgctgacttctttgcggtgacttatactgatggtggcacgcgcaatactggtgtttataagggcggtcatgttaaaaagaccgataaagcagcctgggcttatttaattgaatgggatgaccagaaagttcatggctccggtggtgaatatggtgctactaacaataagatggagcagacagcattgattaatgcactaaaaaagctgcttgagcttggttttaacgataaacatctattatttgttcttgattcgcagtatgtgttgaatgcgattaataagcattggctacaaggctggaaaaaacgtggttggagacgttcttctggaccattggctaatgtggcggaatggcaggaattagatcggttattaaaggaatttcctgatagtacgtttgaatggacgaaaggtcacgctaataatcgcggtaatgaatttgtcgatcatgaattgaaccgttatatggatcaaaaaatgtaagaaaaaaaggctacattgtagccttttttaatttaaaataacgccgccgaacaaaccactaaagaacttaacgatttgatcccacaaattttgtaaccagttgcggttttcttgggtattaaatttattgaagatatttttagctccattttgaatctgactggataatttcgaagcctgttgcttgaagttaccgtccttcaatgcccctgaatcacgaatttcaattagaagattgacaatttgatttttttgattgttgttgatggtgtcacctaagtggttaatattaatttgattgttgacaatgtcgcgaatttgactgtcggtaatgttttgcccttgtttagccatctcattcttggcaccggcaaccgcattgttcaattgagcatctgaataaccttttttgtttttattatcttgggtaatcccagacaaggtattcatttcatcttgagcggcattaacttgcttttgatttaatgcattgccatttttagcataggcagcataaactccagctaatgcccctgaaccatcaattggaatagcgctagtaacataaatgttggcatcgctgatgccggcggtcagggctgcgtttttgtactggttggcagtaatagtcgtgatattatttttaccatcgtagtctaaaattttaacgttgattccgctgcctgagctggtcttttggatcatcgcactggaccaaacaccggatgaagtggtgaaattatcaccagagggatttaaatatttaaccagatctgagccggtaacagtaattgtttgataattaccaccgtttagtggtgcagttaaggtctttaatgtgccttgtttttgtgaatcagttaatgatgtacctaaggtaactacaggtgtatcatcatctgctaatactggcttagtaaatgagatcatcgcgaccacgcttaataacattgctgtgagtagtgtgataaatttcttcattttttcttcttttcttcctttttgatcgaatatttattcttgtaatacggaacattatactaaatatttttcaaaagtgaattaaacaacacgtaaaactttctaagtgtataattttttacggtaagttgaataaataattaaaaaagcccaagtcctttgaatttggacttgagctcaaacaaaaagaccagtagtatgatgttaagaacaaaaaacacattagaagctggtcttttatgaattcaattgtaactgaaatcgcaaatattataaagtctgaagataattatattaagcgtgaaagaaaaataatctgtttcttcttaaacctgattaaggaaatcatggccttggctttagctaaagttgatgatgaaatgattaccaaggttaaagcacagggctatcagattgataagaagaatgagcgctcaatcaatatggcttttggcgaagttaggtatgtcagaagaagatatgtctgcccaggcaaacaagcaaggtatcccttggatgaattaatgggctttgacaaatacaagcgctacagtattttagcagtcaaaaacatcttagaagtaagcagcgttgccacttatcgcaatactgctctagcagtcaattgcctgtctggctttaatattagccatatgcaggtgggcaatttggtaaaaatggccgggaaaaatattaaagcgggccaagaagcagattcaagatatgatgccgcaggcactaagaaaaaggtcccagttttgtatcttgaaggcgatggcgtggtgatcaaaggcactaaaagccggttggaatttcatcgctatcaggtctgtgaaggcattgtcaatataagcaagaaacgcagaaagcgaatcaatgccaaggaatttgtttctttaagccgacttgatgcgctgaacgaagccaaggagtacctggccaatacttatgatctttctgatactgtaattcttagcaacgccgatggcggtgctggatatgccaaaacagacttcgatgacattgtagggctatgcaagcgtcatgagcatttcttggatgtctttcacctaaataagaaaatcaaagaaaggctatattttgcgcctgacctgcaaggcaagctgatttctgctttggaatacaaatacagctatgacaaagttaaaactatcctaaccactgcagaaagccgactaattgatgaattgaataccgagctcaatcatgattatctggggcgcctaaggaattatattgatcgtcattgggacgatattaagccgtttaagaaacgaaaactgactgtgactaaagccattggctgctgcgagagcaaccaccgcaagtatacctaccgtgttaaggggcaaggcaagaaatggtcaaaatctggagcagaaggcatgcttaggatcttaagctgcatcaagaatcgagagctggaattttggcttagcagcgagtttgaagattcagaaataactgtattgactgaacaggaattaaaagcagcggcccgtgacagcttaaagaagcgtcatgaagttcatttaggcatccagcatggcgcattaaccgcacaggtagctggcaatagttatttaagcaagctaagcagaaatttaagtcatataaatatttaagaaattaaggttagactaatggtttaaaggctaccgcaaaaacattgacacttactaaaactttcttaatttcgaccttattattgaagatggtataataaagagcaacaaagggggacaatatgttacaagtgcctaagttaaccatcatcatgcctgtttataacacggcgcaatacttgccacgtgcttttgatgctctgcttaatcaagttgacaagagcttcaaattgcttgtagtagatgatggctcaacagataattcggttaaggtagccgaaagctatgccaatcgttttccatattttaaaataattaaaaagaaaaatggcggcccatccgatgcacgtaatgttgggatgcagtatcttgacacaccatatgtcacctttcatgatggtgatgattgggtggatccaggctacacatccttttttattcatgcttttgaaagtcatccagatgtcagcttagtatcatgtggctattggatggattatcctgacaaaaagcaacgcgttgttggtcgaccagaaggtggctatttaacgcgcggtgaaacttatttgaagttgactaatgtctttagctcaccaatgaaaggatatagctggaacaaggcctataaaactgccattattaagaaatatcatttgaagtttgatagggatatttcactactggaagatcagatttttaacgttaaatatatttctgtggctaaaggcgtctactacacgcaaaaaccttattaccactactggcagagaaagggcagtattattcaccagcctaatattaaaaaagttgcggataatttccggggaaattaccgggtttggagcaaaattatcagtacaatgatgaaagaccgcgaggaagaaaagatgcgtaagaagttagagcgacagcaggccttgcgtgatagtgaataggggaaaacatgaaagaaaaagttaatggagtcgaaatttattatcataagttaggtaaaggtgagcctttgcttttactacatggacatcacttagatggtggtatgtttgataaaattgtggctccgctttccctttattacactgtctatgtgcttgatatgcgaggccatggtttaagtgaaggcgacatcgctgaacactacaagaccgaagtagaagacgtctatgcctttgttaagcaagtgggcattgaaggctgctactgctttggctttgacgcaggtggccttgttgccatgatgctggcggagcaatatccgactatttttaagaagatgattgtggccggggtcttcgttaacgggggcggaattcgcccataccactatttaactgaaggttttcatcgtttcttgaagctggaccgcgatagccgagtggaattgaccgaatcctttatttcagttgatgatttgaagaaaattaaaacgccgacgctttgtgtagttggtgaaaaagactgggttaaggttgagcatgtgcgctggtacagccagtttatgcctaacgcgcgattagtaatcatgccgcggcagacgcataacagttacgcggtgcgcagtttgaagttactggatttgattaaaggattttgtagataaatgttgtaggacatctgagaagatgtccattttttataggtttggtaaaaaaggacgtaattgaaatgacgattggtgaagcattaaaggaagaacagaagcgattaggcctaacatctgaagcaatggctgcaggtgtaattacaaaagggacctactctaaagtggtcaatggtaaactgcgtttgagtagtgatctgttagttgaaattctttttaagcataacattgatattagtgatttttttgaaatgataaagagtacttatatgccaaaagagaaattaattgaggaaaaattgttttctgaaatgcaacaagcattaaataatcatgaggttgaaaaggcagaagaatgtttgacaaaaataaagaatcaaacatctaataaatatttacagcaacgagccgaaattacagttgcttacttaacaaatagtactgataaattaagtaaaaattttaaacaagctgtagttgatgagttgaataatcattctaattgggtaaaggatcttgatgcgctgagattatttaatacagcattactaattctttctagtgaaaaagttgaaattgaaatgaatctttttttcattaaattaaatcgtatcaaaaagatttctgaacagatggaagagagatatgcaattttatgttgtaattacttagattggaagtaccggcaacaaggtgaagtaaatgataatgttaaaaatgctttgaaatatttgagcgatcttaagctaacagctcattttgagagctataaggtttgtggaaagtattttggatatttatttaacaaagaaattgatagtgctaaaaatatgaggaaaagtttacttgcattgggaataactgttggtgttgaaaattggcccgtttaattttaatagtttcgtataagaaacattctaaaagctaaggcataggcaagtgtattatcaaataagacaaaaatgaaaggagatttctaaaatgatttactgggaattcccaattcttccagaaaactaagaatgtgttagttgaaaaacgtgttttgcatggaggtttaaagatgcgtagaaaaaattaggaattttgttagcagcaactttgttagctacaacagtaactaatcctttagctgaagtggttgctgcagatgcagtacaacaacccaatcaaaaaggtattagcagtgaaaaaaataatgatattaagttatcacaagaacaaattgatcaatttgataagtttgttgtagtaaaagacaacagctatgtcttagattcaaaagtaaatcaaaatttttcaacaaatgaagttttagtggtaaaagaaatgctaaatacttcaaatcgagaagtgaaaaacaataatttaattatcgatccggataccaaagaaatccttgatcaaaatgcaagtccatttgtaattatggcagcgtataataaaaattatacaacgaaggctttttggtggggtaagcgatattactttacaagtaacatcgctgtaaccagaggtgctagatactttagacatatagcaagtttgagaaatgatcaatcgttgtttttaagtgctttaggagattccattgcgtatgcttctccgtatgctacattagcagctaatgtagcatcaatgggagtaggttatgttgcgggacaatataatggtgctgcttctgcgttggtaagctataataatagacatagacatacgcgtggtgctagttaaatcgttttagttaataaaaaagtccaattagactagactcaagttgtaagtaatttaaatagaaaagagtctgatctaattgaactatctcaagcttaatcgtttttctcaccatttacaagttagttttaatcggttaaatgtgatttgtcgctcgctgtataagctttatgcgcatgatggacttaaacatcgtaaaaatgttgatcagaccaagcttcctaatagttctatcttagcgatgctcatttggcaaactgaaattggaattgaatctcaacgaagattctgtaaattcttcgttggcttatctcattctcgttttaaccgtcgagctcgaatgctcttgcctctaattcgttgtatccgtcaggcttggaatcaagaagtaaagacagctggagaatttttgattattgatagtttcccagtgccagtttgccagcctgtttgcaattatcgtgtcaagatctttcagggcgtagctgatattggttataaagcaaccaagaaagtctattattatggcttcaaggtccacgcaatagtaagcgatgatggctatctgcttgactatgcagttactaaagcgtcagtacatgatgccaaagagacagtagaattgatgatcaatgctcatccagccaaccattatcttttaggagatgaaggttatttaagcaaaaatctagctactaatctaaagcacatgggatatgtgctttggacgccatatcgtaaaaatatgcaaggagctagaaggcataatgatcatcaattgatggcaattagaagaagcattgaaagcgacttttctttgcttagttattacaacgctgagaataatcgagcaagaagtccagtaggctttcaacagcggctagaaatagctattttagctgtgtgtcgggcatggcatttgtctagtctagtgaaagtctagatcacgggtagttgtcgccaagtgtagcgaaccacaagccgttagcggtgacgctatgggtgaaggaagtggctagcgagttttccgagcctacgtacagaaacctggtcaggccaaatggtggatgagactgcagcacaagttaaagtccaaaggacaaccgtaaaaccaagacggtaaaccagggggcagtggaaaattaaagatgaatgtcttaccccgagagatctcgtggacaggtgaaaccgagtaagctttaatatcagcgatcgtaagcctggtcgaaaaaggttaatcgcgagaagtcagctgaggtcgtagtagtgctgaaggttttgtaatgaaactggagcgaagggcctaatgtttgtaagagcatatctcgctataagcaatgttcagacagtccggataagaggatagcctagcacaaagagaacgtaactctttgatggtgaaagcaattgggacaattctgaataaatttacaagtagaaatggagatatcacgagatggaactaattgaacagattttaagtcaaaataatctcaaggaagcaatcaggagagtcaaaatcaataagggagcgcctggtgtagacaggagaacagttgatgagcttgatagctattttaaaaagcatcaagtagaaataaaggacgccatcatgaagatgaagtatcgtccgcaagctgttcgcagagtctacattcctaaagctaatggtaagaaacgtcctttaggaatacccacggttgttgaccgagtaatccagcaggctattgcccaagtattaatgaagatctatgatcctcattttagtgagcatagctatggctttagacctggacgcagtgctcatgacgctattgaacaagtcttggaatatttaaacgaaggctatcaatgggttgttgacctggatattgagaaatactttgacacggtaaatcatgataaattaatttcaataattagagagcaagtaaatgacaaaaccaccctccatttaattcgagcctttcttaaagctggagtaatggaagatggttgggttaagcctaataaactaggtgtaccacaaggcggccctctttcaccaattctatccaatatctatttagataaaatggataaagaattggaacaaagaggcctgcgctttgtccgctatgccgatgactgcaatatctttgtcaaaagcggtaaatcagccaaacgtgtgatgaattcaatttcatcatggctagaaagaaagctattcctaaaggtcaacgcaaccaaaaccaaagttgtacgaccaaccaagagcaactttcttggctttaccttctggaaaagtggcgaatactggcaagcaaagccaggagatgaccgcaaaatcaagctttatgacaagatgagagaacttctctgtcgcagaaaagcagctgctcagcctctatcactagtctttactaagataaatcaagtagttagaggctgggtcaattactttagagttggcgacatgaaatattttctaattaagttcagtcaatggctgcgtcataaagtacgggtggtaatcattaaacaatggaaactaccaaaacgaatatacattaacttaatgcggattaacaaggcactaaagtgcaattttagtgatgaagatattcataaagtagctaatacgcgcttaggttggtataaaagaagtacgggttatgtcattaactttctgcttagcccaaaagtattgggcataagcaaagcggatcgcccaggcttggtcgatccgctagaatattatttatctcgtaaataatcacaaacgtagcgccggatacggaaccgtacgtccggtgcaatgagaggggcgagttataaaactccctctactctattataatatggcatattgtctagaacgatttaactagcaccacgcgtatagacataatcaaatttatttggatatgaatagaacattccaatactctcttcatgtcttaaaacaaaaaggaaaaatgtatgtgggtaattttaataatcaatgtaataattgcaagtattgcgattattgcagggtttaataatcgagcagaagcatttagtttgttcaatgctggtgtagtttttgtggcttttggcattgtcttacttttaggcgcaattccggtttatcgcaattttgatacttcatcagtattgatgtttgtagctggcatattgattgtgttaggcataatcatgttaatcgttagtgtaattgctagatcgactagaaaaatcaatctacaagatttggcaattgcattaatggtagctgcagtgtgcttagtatatttcattcataatgcaagcttgaactttgctaacttattagtgcctgaattagctttaattgtagggctaatcttgcttgtttatccaaaacaaaagtaaataaagttcttcatctggtttagggactaattatgaaatacagaatgcaataattcatgctatagatgaatgcgttggatcatataaaggtcttttatttgatgcttttcatggacaaattaattattctgagctaaatagttcaaaggttatgaaccatattaaggagacaaagtcgaacacaatttatccggactgtactttaaatatgcaactaaaggaattaatgaaaagaacagagacttatctaacaataattaattctaaagatggatatactgttaaagcttttagtacaaaattgcaaccagaaactttggtaaattctactccgttaacctctagattattattacgtactaataaaccattgattaggggatgcatgccattctggtaaagagaaaagaggcctagtatatgagaagattaaaaacagcagtattaagcgatttcttaaatgatttaccattgggtgcattcattacatatgcatattggtatgcttatcaacaaactcataatcaagggatagtctcaatgctgggaactattgccatggttgcactgctacttgcaatttttggtggctacatttcagataagcatagtaagatcaaactaatgcgctttttaattttgatgagattcatcttcattgctttaggaacacttttcttggtatttaaacctgaaatgagtgttgcagtagtttgttttgtagtaattgctagttcagtaattaatattatttataatcctttaactgaagcatttgctcctgcattgatagacgatgataaagaattaatcaaagcaaattcttgggtttcattagcaaataatattgcgacaattgtctcatcgggtgtcgctacaatttttgtgacaataaatcaaccattgatttcgctgattattcttttagtgtcagtaatgatatcttatattctcttaggatttataaaaccggattcagctccagctcatgctggtaaaatcaaagttaaggaaatacttgataattttatagatgggataaaattagtagggcataataagctgattatgttgatgattccaattgcgcttatagttaacttctgtttctatgtgatttggttgttgatgccgaagtttgcaattacggtctttaatcaatattggtttgtttacaatggaatcgatatcgcttatacagttggcggaattatcggtgctttgattttttctaaaattagagacaatatcgattctgctatggtttgtccagcctgtctttccttacaagccgtttgcttagcggtagtcggtattagctccttactaacacgttcattagtttctgcgattatttgcattgcatgttggctagcatatgggatctttaatagtattttttcaatagtgtatttctctgttgtgcaaatgtcgtcttccaaagacaatactggtttaatgattggtgcggtcatgactattttttctattattaacccaattgcgacagccatgagtgatcctttaggaaatatggttaaattgccacttttgacatttatcttgggattaataatggtcttagtgtcagtattgacttttatgccaatttatcaaaggatttttaagaaatatgacaccttatactcaaagtgaagttgtagacttacttaatttagataagaaaaaattagtgaagtatgacaaattatggagtcaactttgtttacaaaatcaaaatgatgacggggcacacaatatcattgaaagaactagtccaattttaaacttaaataatgaatttgatttacatttaccatattcgaccactaatttaaaaagttgcaggaaatttagtaacaaaaaaattaatattactgattttacccgattattgagtaactcttttttaggtaatgaagaagggcacagaatatatggatcagcgggtgcgttatatcctgtttagcctctcataatttgtttgaaaaatgatatagtaatgggattatcgcgaggagtatacggtctggattacttggataaatcactaaaaaagtttgatactaaagtagattttaaaaagttgagtcatagtatttcaccatatactggtcaattgatcagttcaatatttatttgctatatattttctatgactagaactgttgttaagtataattatcgtggtcttagacacatgcttatttaggttggttcgatggctcaagcttttagattaaatgggctagcaagaataaataattttggcgatgtctcatggtcaggttttgatgataaagcattaaaagacagtttgggcttgagaatcatgaaaccagtattgttgcaattttttggaattcaggactataaataatttcttcactaaaaaagacatctcttcaatagaggtgcctttttgtatataatggtggtgtatacgatttttattcagaagaggtaaataatgaacaaggaagaacttcatcaattattgcacccaatgaaagttattggcttaggtggtaaccctgcattaaatgaaaaaattgcggcaattttacaccaaccattgatcgaaactgcggttcaccactttagcgatggtgaaatccaagttaacattggtgaatctgtcagaggttgtgacgttttcgtaattcaatctatccaagatccagttaacgaaaacttcatggaacttgaaattgttttagacgcacttcaccgtgcatcagctcatgtaattaacgtggttgtaccatacttggcatattcacgttcagataccaagactcgttcacgtgaaccaattaccgctaagttagtggctaacttgcttcaattgactggcatggatcgtttaattactgttgatctacatgcctcacaaattcaaggtttctacaatatccctgttgatcacttacatgctattccacttcttggtcaatacttcttagataacggaattgctaccaaggaagatgatgatatcgttgtagtctcacctgatcactcaggcgctaagcttgctcgtaactttggtcaatacttcaatgcaccgattgcaattgttgatcaaagaggtgctcgctatgatactgaggttcacgacatgattggtgatgttaaggacaaaaagtgtatcatcattgatgatttgattgatacaggttcacgtatttcttcatcaactaagtcagtttttgcagctggtgctaagaaagtttacgttgccgcaacccacgcacttctttctaagaatgctactgaagtacttaatgaattaccaattgagcaaatcgtagttactgataccattaagcacaagcgctacccagacagaatggtcagaatttccgtagaccaattgcttgctcgtggtatcgattatgtatacaatgatcgttcaatccaccaaatctttgacgaacaaaaccgtttaaagtaaaattcttattgataatttgaataaaaaatgatcctcactatgaggattattttttattcaaaaaatcgggtagataagtcataaaactatgtctaaatagtaatgattgatataattgatgtgtgttgtatagaaagagaaagagaaagttagaggaatagactatggcacgacggaaaaacatgaagagacggagagttattctaggtaatactttccatctgatcagagaaaatggaatggataatgtttctttgcaaatgattgcagaaaaatcaggcatttcaaaatccttactgcagtcatactatcctcataaggctaagttaactaacgacattatccgcaatctttttaatactttaggtcaacaagttaataattatgacatggctaatagcaatcttccttatgctagaactaaggcatttatttatacgattgctatcttggggatgcacgatgagggcttggaccgtattatttctgaagcttttgttagcaatgctaccctagataattggggaatcatgcttaatgaatggattaaggaaaatcatttatttgatgacattaacgttgacgaaagcgaacttgagacaggaattgcgtttgtaactagtggtattggccgtctatatcatgatcgcaaaaagcaccatttaacggccgaagctcttgctaactatgcaacgagtgcattgatgttcagtttcttgcattgttcttctgaagaaattgatcaagccttaaaagaaggacatgaaattattgaaactgctgatatggaagttgttcaccgagcaattgatacaatgttcgatgaaggcaaggaaattttcagctaaaggggagtcgccatggttgaaggcaaaagagctgatttgcgacgaatgggttatgagcaaaataaccaatataaacgtttgttggctttcgtcatctttttgattgctgcattgtcattgattacagctacttttttaaatccaatctttatgaaaaaacagattaggactagctataatagggcagtagttgttcgccaagtgaataaaaattatgatagcctagctgatttgattaatgcagatagtgaagataattcaaacttactatcggatacgcaaactcaaccaattgccgaccatattattgattattctttgggcattcattggtttaaggttactagtttgccactggctaatcagattttaagcgatatcgatcaaggaattgctaaaggctcatcaagtggggcacaggaagttaaccgtaaactgaaaaagcagggaactaatgcaccttacgcgattattaaagccttcaatttaagtgtgatcactttaggagcaaatattgctggtttattgtttatcgttaatttgataataattattgttaccattattacaatggtttcgctactcaacgatatgaagtcgcgggctacaattcgaatggtgattcatgatacgatggctgctggcatgtgggcaggtttttggctaattttgatttcaggcttgttagcacttgtgccagtaatctttaatgtcgataatatcgaatttggctttttgcttgagattggcagtagcgtctttttggaatatgtaattgctggggtaattatttacatcatttgtgcgataccatggcaaattatagctgctaaataagaatgagaaaacgtaatctgtagaatgattacgttttttgtttgcacaaagaatcatctttctttataattaaaaaataattaacaaatttcatatgtttatattttaaaagaattgggcgagtttatgaaaaaagctaaaattataaagacttttcttgctttcattactatgctttcgactctttttttgtttaatcagcctgttaatgcagccaataaggaggttgagactggctcagtgatgaaaaaaattaagcagtcgaaagaattagtagtgggcacctcagcggattatccgccactggagtttactaccagtgaaaatggcaataccaaatatgtgggagttgatatcgagttggcaaaagatattgccaaggatttacatgcaaagctagttattaaaaacatgagctttgattcacttttggtagcgctagagacaggcaaggtagacatggttatttcggctatgacacctaatcccgagagaaagaagagcgttgatttttctaagatttattacaagccaagtggcgaatatttcttaattaacaaacgcgatcaggccaaatacaaaaaaattaaagattttgctggtaaaactgtcggtgcgcaaactggtagtattcagtattctttgattcaaaagcaaatgaaacagtctaaggttaaaggcttaggcaaaatcaacaacttagttctggcattaaaatctaataagatctctggcattgtcatggaagaaatgactgctaaggcctaccaacaaaacgacaatagcttgatggctgtgagaagtgacttgcgtgaacaacaagctggtaacgcagtagcaattgctaaaggacaaaatgacttagtagctgctgtgaacaagactattaatcgcgttgaacaaaaagatttgattaataagaaatacttgcctgaagcagctaagtatatgaagacagcgcagaagacgaacacgatgactaaatatattccttactttattaagggagttggctataccatcgtgatcacgattttctcagtgttaatcgggatcatcttagggatgctcttagccttaatgcgtttgtccaagaataaattgctgcactggattgcagtttgctatatcgaattcattcgtggtacgccacaaatggtgcaaattttatttgtttactttggtgttggagcattaatttctaacctgtcagctgttgtagcggggattatcgcaattgggttgaactctggtgcttacgttgcagaagacattcgttctggtattgcttcagtagctaaaggacagactgaggcggctagatcattaggtctttctcaagctaaggcttaccgctatgtaattattcctcaagctttgaaaaatatttggccggcactaggaaacgaatttattaccctgctgaaggacagttcattggtttcagttattggggtaactgaattaatgtaccaaacggaattgattcagacttcgacttaccgtggtgttttacctttattcattgccatgattatttactttatcatgacatttactttaactagattgcttaattatttcgaaagacggatgaaacacaatgactaaaatgatcgatatccaacatttgaagaaaactttcggcaaaaatgaggttctgaaagatatttctgcggaagtagataagggccaggttatctgtattatcgggccatctgggtcaggtaagagtactttcttgcgttgcctgaatgtattagagcgtcctacgactggtaaaattgtttttgatggaacagacttggctagtctaaaggatggtaaggaacttgatcaattgcgggaaaagatgggaatggtttttcagaactttaacctttttcctaatatgaatgtaattgaaaatattaagttggcaccgatgaaagtcaagggtgttagtgaagctcaagctgagaagactggactagccttacttgaaaaggtgggcttggccgatcgtgcaaaacaatttccagctagtttatcaggtggtcaacagcagcgggtggcgatcgctagagccctagcaatggatccggaagtaatgctatttgatgagcctacaagtgctcttgatcctgaaatggttggcgaagttttgaaaacaatgcaagatttagctaattcgggaatgacaatggtgattgtaactcacgaaatgggatttgctagagaagtagccgatgaggtctggtttatggctgatggctatttacaagaaaaaggcacgccacaggaagtgtttgaacaccctactagtgaacgtgcaaaagatttcttatctaaagttttataatcaaaaaggctcaagcattgcttgggccttttaatttactcatctgtaatgatggggtttgataatacgtactgtcttacgaaaaaattttgatgccatcctttttgaattaatgcattaaaaaaggtgttttgattattaggcaaagcagtggcttttggaatgatgacagcacgtaaaatcttgttttgaagtaaaattggtgattgcacatctgtttcgctatttaaattagtggttgcttgattggtcggcgtgttggttgtatcctgctgaacttgataatttgtagtgtcattagtactatcttgcttaaatagcttgaatctgtacttctgcacgcctttaacgtcaacttcatattcatgtcctgcaactaggttagtatttgcgggtgaataagttaggatcgttctaaaattgccgtagccacaggagctgtaattcttaacatgagctgcagtagtaacaactttagtatctaaatcagtgatagtaattgttggcttatttttaatggttctatctgataaatagagcgaccacatgatatttttcccttgaagcaattcaatagggaaaagacgcatgctaggataagcaactaccggctgactagcaggacgaaaagtatcattaatgtttagtactttttgaacggaatagcggtagccatttgtaccataagctgccccaatgcctgtagtggttaaacgacttgaaagtagccaagctcggtgaccggtatctgaaccagttaaattataatggtcagtaattaagtcagtgatcacatccccagcggtttgctgtgaaacattaaagtttaaatttgaagtttcagaagtgtctttagctagcttccaaacaaatttggagatattgcttggcttagtttcactaggtaaaccatgttggttaatgaatgggttagcattaattgcggccattacagcagccgtaatctgcgcgtttttattaagtgtatcagtagtcgagatagcgggcagactgaacaatgatcgatagtaattgatataatctgtttgcgttttaatgtattttggatctaagcgacctaccttaaattttttgcttagatttggctttttagcataaatatttgcggcactataactagttttatcaaggttcgcatattccttttgaaaattatgaacttcgttaacttcttgtgttgtgaatgtcgctgcttgtgtaacttgtccggcgagggggataaataaagttgcggcagcggcaatagaaaatttccgtagaagcattttagactcccttctatggttgtcagtatacctttcattataaactataaccaatgaaaaggctttagtgaaaaatattccactattttgcgcttttctggtattctttgcgtataattaaagattggaacatttaaaagaggtataaaataatgactaaaaaattacaagttggtttgatttttggtggtaattcatcagaatatgaagtatcaattgtttcaggccgcaacatctataaggcaatcgacaaagataagtttgatgtgcacccaatttggatcactaatgaaggctactttgctaatgaagaagaaagcttcaaggttttagatgatccttcataccaagttaagaacccacataaagttaacaacatttctaacttaattgaattagaaaacttgccagaaattgatgttttcttcccaattgttcacggtaacttaggcgaagacggtgttttacaaggtttgttccgcttgatggataagccattcgtcggtgatgacgtcttaggagccgctgtaacaatggataaggaattcactaagatcttggctcaaagagttggtgttccagtcgctgattggatttcaattaagcgttttgaatacgacgacaagaagaatgctaaacttaactatgaaaaggtagcagaaaaattgggccgcgacatgttcgttaagccatctaaccaaggctcatcagttggggttagtcacgtaactaatgctgacgaatatactgcagccttaaaagaagccttcaagtatgacgataaggtcttagttgaagaaactgttcctggcaccgaggttgaaacagctgtcttaggtaacgacaagccaattgtagcaggtgttggtcaaatcaccaatgcaaaaggttcattctacacttatgaaaataagtatgatgataattcaacttctaagttacaaatcccagcagatttaccacaagaaattatcgatactgttagagaaaatgcacgtaaagtttatgcagcaactgaatgtagcggcatggctagaattgactccatgctcaccccaggtggcaaggtagtcttgactgaagttaacgctttaccaggctttactaatatcagtatgtatcctaagttgtttgaagaagcaggtgttccttacagcgaattgattacacgcttaatcgaagcaggtatggaccgttttgatcataagaaaactttgcttcacaagcatgactaaacgccaaaaatatagaggtagatttcaatgacgactaacaagcatgattttgaagaattggctgcaccaaaagcagctgcacaagaattaggaattagtgttgccacgttaagaaagtattctttaatcgtggagaaggtgaccggcaagatcgactattttgctcggactaagcaaaaggctcgtctgtatcatcaaaaagatattgatgacttaaaggcttttcaccgtttatctaaaaatagtggcttaactttgcaagaagccgctcgtcaaatctatgctgttagtgaaaagaaacctgaacctgaaactaaagaaccagctcctaagcccgcttataacagtaccgatgtaatggatactgagcaggtggttaagttgcttaacactttgcaaaagacaatttctaatcaaaatgaggcaattaattctttgcagaagcaattgaatgtcattcaaaagcaaaatcaagatttaattgaagcacaaaagcaattagctgcgccacaagatgatttagataagtttgcggctttgccagatatttctggaattgtgagtgcggatgaacctaaaccgaagagtgaagaagaaaagcacgctgaagttaaaaaagacatgaataagagtcaagaacaaatgcatgacgagattatgtctaaggcaaaggaaaatgccaagaagcgggctacgtcaaatgttcaccgtacactagaagatatgcaattaacggaccaaaaggaacactggtggcaaaaaatctttaagttttaaacaaattgattaagaatcaagagctgacctaacaaaaggccagcttttgttttacagtaggcgtataacaattaataggaagtagaagtaatgaaatttaaatggaaaaagcgctatacgatagcagttatcgtggcaattgtgggagcattattgacggttttgtcctattttgccactgatatttaccacaaggacgacgttgccgtgattaccgatagcaagatcaaggatactttgattgaaaaaagtgaagatgtgtataaaaatgcggatgaaactcgccagcaaattttgcacttaaaagttttatcgggtaagcacaagggcgaaacttacacgactaaaaacgtgtattatccttcgcaattgacgacgcaaaagtatcgtgcaggtcagagaatttttgtcaatatcaagaagggtgatccagcgatcgttaatcctaagcgtgattgggtgttagttttggtagtgacaatcactttagcattgatggtggctgcagtagggaagcactcactctcgctggttgtgtcaatggtaatttcgtggctgatcttttatttgattatcatttgggatgtgcatttgaatggcgcccacattattttgctgtttggcttagctgatatcgtcttttcattctttagcttgctcattgtgcagggcttgaataaaaaaatgttggcgacttggttggcaacgctgctaggagtatttgtttcttttgccttgtgctacgtgatcatgaagttaacgggtgaatcggaaatgaaatatgagaccggtgactatgcaacgcaagatccacgaggcttgtttttagctcaaactttgattggaattctaggtgcagtaatggatgaggcgaccgatattatttctagtttgtatgaattaattcaaactaaaaagaatattacgatgagacagttgattcatagtggtcgaacgatggggcaagaaattatgggaccgttgattaatgtcttggtcttaatttttattgctggtgcgctgccagaaactattttgtacttgcgtgataataatactttagcttcaacttttggctttactctgtcgctgggggcaacgcaaagtgtgatttcggcaatcggaattgttctgacggttatttttgcgacgggatgcagtttgttcttcttgaaaaaacgcgattggaagagtttgtttaaaaaagaaggtgagaataaatgagtacattatttgcattgatcgttgtcttagcgattttaatgacaattgtcggtggtgaaactggaattcgtagtttttttagtgtgctaattaatacgattctattgatcttagtggcgatgctaatatcatggggaattaacattgcaattttgacgctgatttttattcctttaaagctagttacgattatctttttaggcactcatgactatacggtagcaaagaattcattttattcttccttcttagtgtgtttgattattagcctctttattttgggttgtcaatacctggctcaagctgcaggactaggaccagaggcaggagagttattggttggcttgtcgcagatgccgggcttgagttatccgatgattgccgtgacagtggcgattttctcaactttgggtgcaatcgccgaagccgcggtagcaatgagttcgggcttgctagaaatcaagaagcataaccctgctatcggtgaagaagagttgatggcttctggtacggctattggtaatgatgttttgggtacagcaatgaacacgattttatttgggatgttcggtagttttttatcattattcttatggtatttccgcttgcattacacgattggtgaagttttaaatgaaaaactttttgtaaatgaagcgttaattatcatgtattctttgattggggttatattaacagtgccactatcatcatttatgctatcaagaggaatgagcaagaaaggaccaaaacatgagagtagaaaatctgacgctgactaactttaataatcgtgaatatcaagttcatacatatgtgctagagcctaatcctgaattggttgagcaaaagcgcccgctagctattgtagtaccaggtggtagctttaatcacttatccaaaagagaaggcgaacccgtagccttagcatttaacaatcaaggcttcaacagtgtggtgatggaatataacttagtgcaagatccagacaaaatttaccctgatgcggggttagatgttctaagtactgtgaaatatttcagagaccacgctgatgagtatcagttagataaagataagattttaacagttggcttttctgctggcggtcatgtggtcagtgtagctaataacatggctttaaataaaaattatcagacaaagtatgattttgataagactgatgctttacctaataagacaatcttaggctatccgctgattgatattaaaaagattggttttccgattccagaagatcaaaaagcaaaaatgcctgtagaggaagatattttggatagtgcattaggtgttacacgtgaaacgcccgatacatttattttccaggcatgggatgatccggtggttttgatcggaaattcgattgaatatattggtgttttgaataagaataaggtttcagcagaagctcatttgtttaactacggttaccacggcttttcattggctcgtcacaatgtggaaactaagggtcaagattggcaggataatccgcacgcggcgcactggttcaacttggcaatggaatggctaaagagtgagtggggcgaatgatgtgaagcataaaaaatcttctaaccctaatgacaatatctatcacactatcgtcaagaatagaaaaattgaccgaatgattatgccttttgaagcggtgtactgcgtgtggctaatcattacgctggttcttaactttaagctatttgcatactcgattgacgcacaattcgtgctaatttctctatttttcattagcggatgggtttcgtcattagttaagaatcattgcatgaagaaaagtagaaaataagataagtaaaaagagttctcgcacgagaactcttttttattagaatcatttactttttatctctaaagaaaataacttccttagcagctacaaatggtccagatgacttgtaaacctttaatctaatagctttggcatcgacatttcttaagccaacaaccttattcttgctatcagacttccaagtcaagtgatcgccgtatggcttaaagttaacgccatcgcttgaaagctcgacactaacttcaacaggatcgccttggtgatcaatctttctaggtacccagaccattcgactcaagtgttccaaatgattaaaggcaaagtttaattcaagtggcttgtcttcgctgaccccatcaatggtttcccattcacttgctaacttcaaatcagtcaagtaatcaattgggtgatccttaggactagctagactgctcgtgacatgaatgtcattaattgcatagttcattggatcgggcttggtaattgcgccaaacggatctgaccattctgaaactttgttgccagctacataacgcaaacgcagggtgtagcgggtatttggcactagttcatggaaagtgaacgaattgccatcaatgccgtcgtgcaagatgccgttaacttcaatttgaacttgatcggttaattgcggccagactaccgtcaacgaatgagagctgatcttgtctggatctaccattggttgttttggtgagcgtaatagtgaatccgtaatggcgtgaaccaaagtttcattgccatatctgaagtttctaattgtaatttcaatcttagaatcggtaatgtcgcgtttagccagcttaatttgtaaagcagtttgtttcttttcttggtattgatcaaactcaggcatccagctgtaatttgtgttaaagaagaagccttccttagcatgggcaaatgtatcaacggtaccgtactcctgcattgggatttccttgtcgttgattttaacagtcaaaccatcaggataaccgtcacacatgatgttcaagttggtggtgttttccgtttggaaagtattgaaatcgccttgagttgggtcgatggtgatcgtcaatttgcttgcttctaaatcactcgtgatttgtgtagctacatggtttcttgaatagtcgttatagccgttatcatcgtaagtaaccattttactcttgccttgagggtagaggacataattgcgttcgccgaggtcaaaaatagcgccgcctcgtacaaatactggtaaatgccaggatgggtaagactgcttattataaacgcgtccgcccaagtactttttgccatcaaataagtcaacccacattgttctgtggttaggcaagtaaaggttgtcttttcttgaattgccattaccatcttcgcgaccgttaacaattggcgaaatcaacaagttaggccctaacataaattcatggcccacctgtggggtgtagttgacttgttcatgtggaaattccaagaataatggccgcaagattggctcaccgacttgagcgcggtagattagggtatataagtaagtctgcaattgctcacgtagttttaaataggcgcgattgatttgcgtcatcttactattgtaagcaaatggggtcttactaaatttaccttgatcgtctaagttgaacaggattggggtaaatgccttccattcaaaatcacgaatggcaatttgagcattaccaccgccagcggtgccgtcaacggcgctgccaactaaaggctgaccagaaaggctagctcccaaaaagccagctacttgcgttggaatgttttcccagttgccgccaatgtcaccaaaggctagcattgttctattttgactaccagcaataccagtattagagaaaatcaacggccgcttacgcttcaaattgttgcgtaaaattagcgcatcatttttcaatacttttggatcggttgtgtccgtttgaataaaggtggtatcaggtgaagccttcggtgtgttgttttgactccaaagaccagcgctaacgtcatgtatagcggcgtattcactgaagctagccatggcttcttcgttgatttcttgcacatcatagttaggcacgatccaacttaatttaaaatgctgcttctggtagcgatcaaccattgcccgtgctgagaattgatattcttcttcgccgttcaaggaacctttgccactagcatcttctggcttgttagttctggtgtaataattaccgtcttcaaacatgacagcattacgttccttagcttcaccaggttgccataaggtagttaaaaagttgccaacatgacctaatcctagtgcatatttaggtggcatcagcggcttacccgttaacatgtaatacttttccaaaatatttttgggtgaattacctaatagataaaaggtatcaaacatgttggtgtcgtgcttcaagatagtggcatccggattgcttttaccaaagtcataattgccagcactctcagtattgcgcaattcaccaaagccggagttagcccagaagaatggcacttgggtcaaaacgccgcctttaccggtaatcttgtcgcgcttgattgaaatgatttcacctttatgactgaagtagccgttctgcatcccgccaccaaagtaaaattcattcttgtgttgcttcaaaatttcggtagtttgatcattgcctaattcaagtggactcagctgaaccaaacgattgcggtgcagcatctcgtcaaagatgctcattacggctggcttttgttggaaaataagttgataattgccagacttaatgattaaggaatcgctggttgccttaggctgtgatttttcaaaatagtcattgttgaattgagacaggtcaacaaaagatgagtgattctcgtcaaacttcttagctggatcgagaaaatatctgaagatcccgtcagctaaaatataaagacgagcaatatcgccggtggagtagtgaagttcataataatgatcacgtttgttggcaccgataagttggcctagttgatgtctttctatttggttttgtgtcatatttattcttcctatttaaacttgctaccttatattataactaaaaatcaaaaaacttcttaagcaattgtactaaaactggtatttaccaattttgttagatataattaaattaacaattacgatttagacatataaagaaagaagatatttatgacttattacattcatgcagataaatttttcttagaaaacagaacagaaaacggcggctatcttgaagttcaagataatggcaagtttggctttttctatccagaaagcaaaaagccagaaggtaagattgtcgattatgctggcaaatgggttgcaccaggattagttgatacccacattcacggctcattgcgtgaggatgtaatgaagagtgattgggaaggtattaataagatctccaagggcttgcttagtgcgggggttacttcatggatgccaacaacgatcactgctgcaagcgataccttaactagaatttgtaagatgtttgcggaccatcaaggacaagaagaaggggcaaagattcaagggattcactttgaaggaccattcttcacggaagaacatgctggagctgaaaatcctaagtacatgatggatcccgatattaatgaatttaacaagtggctggacgcttctaacgggatgctgaagaagatttcaatggctcctgaaagaaaaggttccaaagaatttattcgtgaagccgttaaggaaggcatagtagttgttttgggccactcaagcgctagttttgaagaagcagtcgcaagcgttgaagcaggtgcaaccatgtttactcatacctttaacgggatgcctgatccaagccaccacacgccatcaatttctaatgcggcaatggcacttaataatgtgaccgatgaattaatctgtgatggccaccatgtgcaaccatgtatggctaagactttgattaatgccgttggtccagaacacattgccttgatcactgattgtatggaagctggcatgatgccagatggcgactacatgttgggtgaattgccagtctatgtaaaagatggcatggctcgtcttaaggacggcgacaatttggctggatctatcttgcaattgaagcaagcagttaagaatgtagttgactggaacatcgttactccagaaaaggcagtgatgatggccagctatgttcctgctaagagtgctcatatcttggacaattgcggtacaatcgcaccggataaggatgccgacttcttgattttgaacccagatttaaccttgagtgagacttacctaaatggtgaattacgttataaggcttaatttgttagtctagttttaaatagtcctcattagattgagggctattttttgaccctaaattttggcaaatagtatacaattaataatagtaaagtaggtattatacatacgaggaggaatttactgtgccagatggaatcagtcaattactagtactttttatgtaataactttcaattaattgaataatttgtactcttattgattaaagaaaagtatcacatatgtttcatgaatctcgtctagccaagtaggtgagattttttattatgtttctatgtaatcgctttcaatttagaaagaaatatgctatattatgagtgtaaagaaattaagaaataaaaaatatttaaataagtttaggtaaaaggagacaggtgagttccgatgggcacttgagagtagaaagtcagatattatagaaaggtttgtgataccaatgggcatcgtaaattgaaaacaaaatgtagttcaataatcatcaagtgatattaatgtacataagaggccgtgaaattattagtaggcatagaataataactatttgatgaatcacttggattaggattaagaaagactttcatacatgataaatattaataagaaatgacctttcgctggaatgaagtatgcgaagggtcatttaattttggcttgaaaacgtttggtatttagcattattgttatttgttaaatataatatgaagtacatgtactaggccgatagagaggaaagttatgacaacagactcaattaattttaaaatcgatgcagaaagtaaaaaggtgatgattaaagaattagcaattattaatggcttaattcctgatgatgataatacagtagataatctgagactgtaaaatagtttgtgtaaggatgaatgattccttaaatttatttctttaaacattagaaaaaggagttcctttctcgtatgattggtttgaacacaaaaacacatacagaaagaagaactccttcatgaatgattttaccaaagattttgctcaagctctattcaatccagacaaaataaatgatttattgcgcaaagagctacaacaggctgttaataacttgttagaagctgaattgactgcctttctgggctatgatccctatgccagaaatggctggaatactggcaactctagaaatggtgcttatttccgcaaagttgatacgcaatttggcccaattgaagtgcaagtgccccgggatcgcaacggtcaatttcatcagcacacgctgcctggctacaagcagcactcggatatcttggaaagcatgattatcaagctttactccaagggcgtgaccaccagggaaatagccgatctaattgaaaagatgtatggcagccattacagtccagctcaggtatcaaatatttccaagcagatgattccaaaggttgaggcttaccacaaacgcaagctaagcgacaagtttttctgcgtctatttggatgcgacataccttcctttgcgccgagaaacatttgagcgtgaagcagtctatattgccattggcatcaagcctaatgggcacaaggaggtcattgactactgcattgcacctagcgagaacattgaagtctggacagatatgcttcaaaacatgaaatcccgaggcttaaagcaagttgagctttttctttctgatggtgttgttggcatgaaaacagccttggccaggacttatcctaaagctcattttcaacgctgtttggttcatgtcatgcgcaatatctgcgctaaagtacgcgtcgacgatcgtgaaaagatcatgaacgaattcaaacaggtgcatcaacagacaaacaaagaagaagccacagctgtcctgcatgacttctataccaaatggggcaaggtttacagccatgttatcagaagcttgaaagacatagaaccagatctgctggtcttttataactatcccaagcagatcagagcttcaatttattcgactaacatgattgaatcatttaacaatgtgatcaagcgcaaagctaagcctaaggcagagtttccaaatgaacagtcgcttgatacttttattggcattcaagcaatgagctacaacgaacgctatttcaatcgaatccacaaaggcttcggtcaggttcaggataccttagaatcctactttgattaaataaaagattaaaaaatcaatctacgagaaaaatctatttacacaaaagatttgacagtttcgataatctaaatgattattttaaaaacttaggaatttaatggtttattggtcttttatctgatgtagtaaatcatgatttagtaagtcgtaatttagtaaaatataatttagaagatggtgatcttatgtttattggacgaaagaaagaacttactaaattagagcaatttaattagcgtggctaaaagatattactacttgttttcaaagtcaggctttacggattcatgtacggaactggcagaacaagtggggtgcaagttgattagttttgatgaaatgtaatatcatttttcctattatttttatctgttgtgatcggagtaagtactggtgtttaaaaaaggcgataatgtggtgttaattctaaagcctaatggcaatcttgaaatgaaaaaagaaaaaactaatttttgggacgaagtatcaaaaatgtctgctaaagaaaaaagattgcagattgaagatttgggatatgatccattagaacaaagatcaaaaggtagagaaagaattgaggattaaaagttagaaaaggttcttggaatcttttttgatgaatttaggtaatctgaaaaaagaaacggcaccgctagataattagcgatgtcgttttagttatgcttagctatattagtatgtctgcttaatttatttaataaactgcgccgtcgtagaagttgtaacgagggcggttgaagtcgaagtcttttaattcactgatcttaattgcgttatcgcaaacaccccagctcattaagttgattggcttaccgtaatctccatcaggaattaccaacaagatgtacttgccttttgaaagggcatagccaagttccattcccagaccaacatcttcttcttcaggcaagtaaacgccaagcatgatgtcgctggacttaatccctactaagtcgttatggtaggtagctgatgcccattcaatgtcgtgcaagtattcagggtgttcatcaacgcggatacccttatattgattatcaagaggtacgtagctgttttctaagtcaacggtaggattttgctttagagcttccattgcttctttgtaagccttattttgcttttcgttgaaccaaccggcaccaaagtataaagtttttgtctttgccatatttttctccctttaaaaatgatttaccttaactttaccatcttttgggttgaaaaaaacgtcttgttaacttatggtgaaaatgttaattccacattaggaaggaaaaatccaatgactaatcaaaatctttttgcacctgatgcagtatttatttctaatcaaactaagcaagatttggtttttaaagaagtttacgagcatttacgcgaaagtggctatgttaagggaaactttttaaaccatattgtcgaaagagagcataattttccaacgggattggatactgcaacactaggtaaaaatattcctaatattgcgattccgcacaccgagggcgagtttgttaacacgagactgattgttccggttgcgctgaaaacgccagtcacttttcataatatgattaatcctagccaagcaattgaagttaaatttttattcatgcttttagataatgacccagatgggcaagctgcattattagctcaagtgatggattttttggctaatacgccagccaacgaattgcgcgaagtttttaattttactgatcctagcgcgatttatgcctttttagagcaaaaatttggtaagaaaaaagaagactagtttttagccttctttttctaatcttcaagataaatattacgcaacttcatgatgtctgcacttgagagcttcattacatcgcgtaggtagttattaataccgccatattcatcgtttagtactttaacagcatggtcaaggtattcactgcggacactctgaatgtcacgaatcgattgcagcacattttcatttttaccattttgacgggcatgttcaatcatactgtcgacgaaatccttggtagtgatgttggttaaaagatagtctttcttaatcgtatttagtggtacgccaagagcagataatgcaagtaatgcaccgaagccggttctatccttgcctgcagtacagtggaaaataacactttcgccatccaccgtattttcaagcaagacatcgaagaacttgcgatatgccttttgtgcaggttcactttcgatcatgtcttcgtaagcataatgcatgtgattgaagccaaaatcagcgtcgtcgtgtgcttgtgtatctaagtcagtgatactcttggatgaattggttaagtcctcactgaagacgggatcatagatatattcaacaccatctggcacgcgatcgggttgattatcaacttcttctttacttctgaagtccacgtcatatttaacgccgtaatcagttaaaaactgcttatcaaatggtgaaagatcagctaagttaccggttctgagcaacttgtgcatcttgatttttttaccggataaagtttcataacctccaagttcacggaagttgcgtccactagttacgccgattaattgattagttaatttcttagtcaaaaaaattctcccctttctgttaatgaatgtcatgaatattattttagcaacaaatcttcaagcaaacaatcaattaaaaagtaacggctttcaaaattatgctaaaataaagggtaagtactagtgcaatttataggagatgaattaacgtgacagataaaacaaaagaaagcattttagttccagttgatggctcagaatcagctgaaagagcctttgacaaggctgtaaaagttggtttacgtgatggtgctcatgttgatgtattgaacgtaatcgatacgcgtcaatttatgggtgaaatgcaagatactttgatttcaggagataccatttaccaaatgactcaagactctgaggaatacttgaagagcctaaagaaatgggctcatgacaacttcaatttcgatgatgttgattaccacattcgttatggtagtcctaagcgcattatttcttacgacttcattaaggaccaccacaatactttaattgtgatgggtgctactggtttgaatgcagttgaaagaatgttgatgggttcagttactgaatacgtaaaccaacatgctttagctgatgttttgattgttaaaaccgatatgggaaacaatcctcttaagccaactatgaaaaagaactaatataagaataatcgccaaataattctaaattcattggcgattatttttttgaaaaaagttgcaaaataccttgatagaacacgaatgtttctggtattattttatcaaatgaacgtgggaacgaaaaaggggagtgaaagataatgtttatgcaatcagaacaatttattgcaaaggatgtgtctttcgctcgtaaagacgttttttctgttcgtttagttattagaaacgtcattaattaggcttaattattgatcgcctttggcgacccgtaattaagtctttttttgtgatgtagagtagtttgttttatcactgtgtatttatgtttatggaggacataatgaaaagatttagaagaatcttggtagcagtagttgcacttcttgtagcagtagttgcaactgcatgttcaaacaagagtaatagttctaagggtggttataccccaaagtcattaactattcaatttgtaccaagtcaagctgcaactaagttgcaagctcgtgcaaagcctcttgaaaagatgctttcaaagagattgggtatcccagttcacgtttctatgtcaactgactacaacaccgttgtggaagctatgaaatcaaagaaagttgatgtaggtttccttccaccagatggttatgttttagctcacaagcaaggcgcagccgatttacttttgcaagctgaacgttacggtgttaagcaaccaggtggtaaagcaaccaaccaattagtaaagagctatcgtgcagaaatccttgttaagaagggttcaaagatcaagaactggaaagacttaaagggtaagtcaatttcagtacaaaacccaacttcatctgctggatacgtattcccagttgctgaacttaagcaaaagggtttggacgtaactaagagttgtaagttagttactgttactggtcacgaccaagctgttttgaacgtattaaacggcgatactgatgcagccttcgtctttgaagatgcacgtaacatcgttaagaaggacaacccaaagatcatgagtcaagttgttccaatttactttactaagccaattcctaacgacactatctcagtaattccaagtatgtctaagtcattccgtaagaagcttgctaaggcattcatcgctgtagctaagtcaaaggaaggtaagaaagttatcgaaagcgtatatagccacgaaggttacgcatacgcaaaagatagtgacttcaacgttatccgtaaatacgacaagatcgttgaatcaactaagaaataataaatttaattaagggagtttgacgattaaatggcagataagccaatgattcaattaaaagatgtttccaagatctacgacaatggtactgtaggtttaaagggcatcaacttaactattaataaaggtgaattcgtagtagttgttggtttgtctggtgctggtaagtcaactttgctacgttcaatcaatcatttgcatgatattacttcaggcgatattttgattgacggcaaatcaattacaagtgctaaaggcaagaatttgcgtaaattacgtcgcgatatcggaatgattttccagaactttaacttggttaagcgttctagtgttttgcgcaatgttttggtaggccgcgtagcttactacccaacttggaagactacttttaacttattcagtaaagaagataaacaaaaggcttatgaagctttacaacaagttgatttggccgataaagtttatgcacgtgctgacgagttatcaggtggtcaacaacaacgtgtagctattgcacgtgtgcttatgcaaaatccaaagatcatcttggctgatgaaccaactgcatcacttgatccacagacttcagtgagagtcatgaatgacttgaagatgcttaatgaaaaatacggcatgaccgtagttgctaacttgcacagtatcgaacttgcacaacaatttggtgaaagagtaatcggtatccgtgctggtcaagtagtttacgatggcaagatgaaagatactcctaagtctgtcttcactaatatttacaatggtggtaacggcagcgaggaggatgaataatgcctgaacaagtaaatcaattgcctaagagtaagttcaaagtaatgaacttggtttggacaatcatcatgattgcaggactatttatttcaatcaatgttactaacacgcacattagtgtcttgtttgaaaactggaaccaatttgctgacatctttattcaaatgtctcatccagattggagctacttgaacgttgtttggcctaagttgattgaaaccatcaagatggctgtcttgggtacggtaattggatctgttgtcgcatttatctactcattattgattgcccgtaacatcgttaagaacaaggctgtgactggcattcttcgtgtgatcatgaacattgtcagaaccattcctgacttgcttcttggtgcgatcttcgtagctatcgtaggtatcggtccagttgctggtatcttggctttagcagtcttcacctttggtgtggttgttaagttgttctacgaagcaatcgaaacaattgatccaggtccaattgaagctttgactgccgtaggtgcaaacaaattgcaaattatccattacgcagttatgccacaaattatcacttacttcatttcatatgttctatatgcatttgaaatcaacgtcagagcatcaacagtccttggttatatcggtgccggtggtattggtttgaacttgcaacaaactttgcaggtcttcaattacgctcaaactggtacgatcatcatcgttattatcgtagttgttgtcttgatcgactacgtttcatctaagtcacgggaggcgttaatgaaataatggatactacaatgaaaaaattacccgctaaacccgttgaccgtaagaaacaagttgcacattggctaattgcaattgccactatcgtaattattgtttggtcatgtactggtattaacttcggtggtattaaagccactgctggtcaaattgccggtgcaatcttctcaggtattttccatcctgactggagctatgtttacaatggctcaggtgaagacttggtctcacaattgtggcaaaccatttgtatcgctttcttaggtacattcatttccgcaattatttcattgccatttgccttctgggcagctcacaccaagcacaagcattggtacacttcaagaatcggtaaaattgttttggcaattatccgttcattccctgaaattgttcttgctttgatgttcatcaaggccgtgggtcctggttctgcagccggtgttttggcattaggtttccactcagttggtatgcttgccaagttgttctcggaagctattgaaaacttggaagaagggccaaacgaagctgttattgcagccggtggttctaagttccacgtaatcatgttttcaactatgcctaacttgatgccagctttgatttctaacaccttgtatcgttttgatgtttccattcgttccgcatctatccttggtttggtaggtgccggtggtatcggttatccattgattattgctttgcaatatcgtcaatgggaccgtgttggtatcattttgctagggatcatcattatggtggtgatcatcgactggatttctggttggatcagaaagaagttagtctaattcccaaaatttgaatattaaagaaagcgaatacgaaaagtccccgcttttttgttagccgtgaaatttaaattggcattgattaagatgatcattaattaatccgattccctgcaagtaggaataaatgactacaggtcccacaaaggaaaaaccatcttttttcatttgtttggatatcttctgcgataggtcattagaagcgggaacgtcatcaaagctggcaatatcatgcacaattggagtaggtacaaaattttgtaaatatttggcgactgaacaatatttttgttcaattgccaaaaatgcccgagcatttttaacagcagcattaattttcattcgattacggataatgcccttgttttgcattaatgactcgatatctttatcggtcatctttgcgacttcagagatctgccaatttttgaatgcagctttaaaattgtcgcgtttatgcaaaactgtggaccagcttaaacctgattggaaaagttcgagcacaagcatttcatacaaatgtgactcatctagattaagtttgcaccattcatgatcgtgatactcctgtactgcttcgtcttttgtatcgccccatggacagcgaataatttcttgattcatatttttctctctttctatgtaagtaatgttttacccctctattatttattacgcaaaaaaatgcgattattttttgagaaattatatttttatgtgcgaaataagggttttaacagctttttttgctataattaggtgtgaatttcgaggaggatcctatggaaaaattagataccatgatgttggctgatgatttagccttatcacaagataaaattttaaatggcgaacaagactttggcgctgaagctgtttacaaagtaatcgataacttgggcgttttaaataacccaatcaaggattacttcgacatgactgaagaacaatattatgaagctgaaagcgatcacaaactaactttgatcaagatggacagtaagttgactgatttgcatgatcgcattttaactaaccatgttgatggttttgttgataaggacgagatcaacttgacctacaatcatgagaatccatatgaagatgatttatacgatccaactactgattatcgtgaaattgtttacagcttgaaagttattggtgcggttcaagcaattgcagctaaggacttgcaagaagtattgtctaaagatgctgtattatcaattggacttgccgcatatgctttagcacacaacgcataaattatttgagtcggctggtaagcggccggctttttttgcttttttgaggcgaaaagatgaatttgtttaaacacataaagggaatagttgatcgaatcgttggcgccaaaaaacgctctgcaatggataaagatagtgaattgcttgatccgatgcaaaaatatactactgttggagaatatcatgttggtgccgttgatggtacgccgcatggtaaggactatgttttaaccgtttatcaagacgaagacggcgttttgcgacaagcacttagtccagagagtacaacgaaattagcaccggaatatttacgcaagtataatgcggaactaggtcattttcgtgcctttcataataagaagacagggcgccgttattgggtggaaaattacttggataatttcactacggaagtgaaaaagcatattcgcccaggcactaattcggtcaatatcggtgtaattacagatactcactttaaagataaagatagcagcgatttttatggctttaatgggctgcaacatgtgcaagaattttcttatttagatcaatctggcttgctagatttaaaagtccacttaggtgactggatcgatggctccgatgctggcctggtcagtgaaagtgaattggtcaagctgaacaagtcttttaagtcggatcaggtgccatatttgagtatcaagggtaatcatgatgaaaatgataagtttgatgaacatcatgatttaaaagcctcatttccagaaaatgaattcgaaaatattatgtggcccgatatgtaccggcaacgaggaattcattatgtttcgcgccagcacggggtggcatactttgatttagatgacgtgcgggtgatttcagttaatacgtcagatgttccatatgaattaaataaccgcgggcaaaagcgctatgacaataagattgtattggctgtgcgtgaagatcaaattgaggaaattatcgaaattttggctaattcttccaacaaaaagatcatcttcatgtcccatgccaacccaattaatcgaaaggggtctaatgcacttaagtataatggccgctctttgcatgaactgctagttgcctttaatcaacgtgaaaaaggtcgaatgcacgctagcaatggtgttccaacagaatttcgtttatcaaatgattttgattttaccaatatcaagaatgcgagaattattgcctacttctgcggacatcggcatcgtgaagaccagtatcggatcaacgggattcaatatattttgtttaactgttctgccttgatggggccaaatcattcgctaacaactaaatacaacaaaaacttagaccgaagaattgatcaaaataatgaatttgcgggttatattgtgaacgtcgatttaaaacgacaccgcattcaatcctttggctatggtgcagcttctagacgccgggtgtatttcatttagttaaggaatagtaaaggtatttggctattacaagtgtttagcttataataaaaaggttaaagtaaaaaatagtgaatattatagcaaatattaagatttagagaattgacttaggggaatttaaattatgtgcggaattgtcgcgttttatgatccaaagataaatgaaaagcaggctgtcattggcaaaatgatggccacgattaaacaccgcggacctagttccgacgggtattatactaatgacgaggttgcccttggttttagaagattatcaattattgatcttcgtgggggtagccaacctatttataatgaagataaaactagagcaattatttttaatggtgaaatttataactttaagccattaagagaagaattaattaaagcaggccatgattttactactaaggctgatacagaagtcttacttcatggttatgaagaatggggcatggatggcttgcttaagcgtgtacgtgggatgttcgccttcttaatttgggatgacaacaacaagaccctttatggtgcacgtgacttctttggcattaagccaatgtactacagtaatcaaaatggccatttgttggttggttcagaattaaagagctttttggaatttccaaagttcaagcgggaattaaatgttgaagcagttaagccatacttgatgaatcaatacaatgacctagaagaaaccttctttaagggcgtttaccgcttcccagcgggccattggtttgaatacaaagatggtgaaatgaagacccatcaatattgggatgctgaatataaagaaaatagcctttcctttgaagaaactttgcaaaagatcaacgaagatttgaaagaaacggttgatttgtatagaaacgctgatgttaaggttggtgctttcttatcagaaggaatcgactcttcatacttgactagtttgcttaacccagatgacgttttctcagtaagttttgatgattcaacttatgatgaagcttctaaggctaaggcattagcagatattaatcactggaagttcttcagcgataaggttgatgctgatgaagcaatgcgtgacttcccagaaatgcaataccacatggatgaaccagatgctaatccgtcaatcattccactctggtacttgtgtaaactagctcgtaagcatgttactgttgctctttcaggtgaaggcgctgatgaattgtttgctggttatgtgaactacgggatgcatacgcataacgacattattaaggtctttacttcagaattgaaaaagttgcctgagaagaagcgggttaaattggcacacaagattaagagaatgcctaatttcccaggtaaagttcacatgtacaccaatttagctgaaccgagtgaattttatgtcggtcaatcggttatctatgacatggattacccaactatctttacttctaaagatgctaatagcattttacagccaacgtatcgcaataaattgactgttaacggcatttaccaaaaagactttaagaaagtaaagggagtcgataatgttaagcagatgcaatacattgacttgcaccactttatgcttaacgatattgaacaaaaagctgataagatttcgatggcccattcacttgaagttcgtgttccttacctcgacaagaagattgcggaattggctaactctatcccaaccaagtacttggttaaccgtcatgataccaagtatgctttgcgtaaggcttcagaaaaagttttaccagatgagtgggctaagagacctaagcttggcttcccaactccaattaagcaatggttgaaggaaccacgtttttacaaacaagttcatgctctttttgaagaagaatttgtcaacgatatttttgaccaaaagaagattatcaagttacttgacgacaactatgaaggtgatggctcacatagacgtcaaatctgggctatctataccttccttgtttggtacaagttgttctttgttgattacgaaaacacagttaagaaatatcaacacgtgcaacctgaagttgctaagctaatttcacagggtaaattactataattctagggagattttttgaggatgagtaaaaaatttacgccgatcttactcggtagtgatatcaacgtgtatggtatggcacgttcatttaatgaagcatatggcattaaagtgaaggccttagctgacgttcaacttgctgctactcgttattcaagcattgtggacgttgaattgcatcatggctttagtagcgatcctacttttatggacgtgatgcacaaaaagatggaagaatacaagaatcacgaggagccagttatcttgattgcttgtggtgatggctatgctgagttgctttctaagcaccaagatgaattgaaaaaggtctttatcgttccttacataaaatatgacttacttgaaaaattaatctctaaggaaggcttttatgaaattgcggaagaatatggcttgccttatcctaagactaagatcattacgatggatgactacaagtcaggtaagtacgaggatgtcccatttgatttcccagtggaattaaagccggaagatccagtttcatggttgaagtgtcaatttgaaggtcggaagaagacttttgccattcaagataaggctgaatttaaggatatcgtaactaagatttatactcatggctacaacgctgaccttattttgcaagactttattcctggtgatgattctaacatgcggaccttgaatgcttatgttgataagaaccaccaagtaaaaatgatgtgtttagggcacccattattggaagacccaaccccacaatcaattggtaattacatggcgattttgcctgagtacaatgaaaaattgtacgaagaagtacaacaattccttgaaaagttgaactacactggtatggccaactttgatatcaaatatgatccacgtgatggtgaattcaagttcttcgaaatcaacttacgtcagggacgttctagcttctacgtaactttgaacggttacaacttggctaaatggtacattgatgactatgttgaagatgccttgaaagataaggaaacagtttatggtaataagcttgaatctaaatacaagctttggttaggcgtgcctaagaagatattcaataattatgcttatgacaacgactataagacgactgctgacgaacttattcgtgagggccgctatggtactactgtcttttatgacaaggatagaaacttcaagcgctggttattgatgaagtacatgttccataactacttcaaacgttacaagacttactatgaagttaataagggtaagatctttgacgaagaaaataaaaaattaaacaaatagtttaaattgagaggtaaaaaatgcctctctttttttctaaaaaattttagctgaatcattttccaatttaatggtcttttggttaatacaagatatattcatctatatttgaacacaatacaagatgttgtgttttatgctatgataaagacacgagatttggagtgattgaaatgctaaaagaagaatttaaccaacaaaatgtaacaaaatttaatacgcctaaaacttttgttaaacgtgatgggtcaaagtatccgttcgcaatttttaaactcaacatggttttgcataacctagatttagataatgtagcacctgctgtaattgaaaaaattgtggctaaactagatgctgctgatgaagtaaatgcacaagatgtagcagttgcttttagagatagcctaaatgagttgggttatttggatgaagctaaagcttatgtgcaataccgcaagcacgatgaagaggaatggattaaacaaaccgatactcgtgcacggttaaagcgaatggttaatggtgacccaacgattgttaacgagaatgccaacaaagatagtgaggtcttcagtactcaacgtgatttaactgccgggaccgttggtaaaacagttggtttgaccatgatgcctgagcacattgctaaagcccacttgcgcggtgatattcactggcatgacttggattacacaccactttcaccaatgactaactgctgtttgattgactttaaggatatgctaactaatggcttcaagattggaaatgcctatatgactagtcctaactcaatcaatgtggctacacatcaagttacgcaaattattactaatgtagcttctagtcaatatggtggctgttcttttgatcgagctgatgaagtgttagctccttttgcagagaaaaactaccaaaagcatttaaaggatgctggcaagttcattgatgatcctgaaaagctggaagaatatgctaagagtcaaactaagaaggacatttacgatgccatgcaaggcttggaatatgagattaataccatgttctctagccaagggcaaacgccatttactactttaggttttggtttaggtacttcttggattgaaaaagaaattcaaaaagatatcttgcgtatcagaattaaaggattgggtagagaacgcagaaccgcaattttccctaaattagttttcaccattaagaagggcttgaacttacatccaggggaccctaactacgatgttaaacaactggctattcaatgttcaactaagcggatgtatccagacgttttaatgtatgatacgatcaagaaaattacaggttctttcaaggttccaatgggctgtcgttcattcttacaaggctggaaggatgaaaatggtaaggaagttaactcgggcagaatgaacttgggtgttgtaactgttaacttgccaagaattgccatggagagtcatggcgataagaagttattctgggaaatcttcgatactagaatgcggacttgccaccaagctttagcctttaagggtagacgtgcaattcaagctaagcccgaaaatgcgccaattatgtatcaatatggcgtctttggtaaacgacttaagccaggtgatgatgttaacgagcttttcaaaaatggtcgagctacgatttcgttaggctacatcggtttgtacgaagtagggacagtcttttatggccctgattgggaacacaatgaagaagcacatgattttacaattgagatcgtgaagaaaatgcatgacttgtgtgctaagtgggaaaaagaggacccatatcattggcattacagtttgtactcaactcctagtgaaagtctaactgatcgcttctgccggctcgatacggcaaagtttggcaaggtgaaggacatcactgataaggaatactacactaattcgttccactatgatgttcgtaagcacccaaccccatttgaaaagttgacttttgaagcaccatatccatattatgctgcaggtggttttatccattattgtgagtaccctaacttgaagcaaaatccagcagcccttgaggcagtttgggattgggcttatgacaaggtaggctatctaggaactaatacgccaattgataaatgttataagtgcggttttgctggtgaattcaagtctactgccaagggttttgaatgtcctaagtgtggtaatcatgatcctgctacttgtgattgtgtcaagcgaacttgtggctacttgggcaacccattgaagcggccaatggttcacggtcgtcatgaagaaatcgtgcaccgggttaagcatatggactttggcatggaagatagtttagctaccgaagaagaagtaaaaaaaggtgagtactaatgcctgaaaaagataaaaacactcaagaaggaccagatatccggagtaatttgatcaaggttaatatgggtggggataccatgtttgtggatcctgaccaatataagccacagttagatcaccaacgtgagttaaaaagaatgcaccgcaagccgaaaaatccaaaaccacaagagtggaagactgaggattattctaaacataaaattgcggattataagccatttaactttgttgatggtgaaggcgttagatgtagtctttatgtttcaggctgtttgttcgattgccctggttgctataatttagcagcccaaaactttaattatggttttccatatacgcaagaattggaagaccgcattattaaagacttgggccagccatacgtgcagggattaaccttactaggcggagagccattcttgaatacttgggtttgtttaagaattattaaccgaattcgaaaagaatttggccacagtaaggacatctggtcctggtctggatatacttgggatgaattgcaaaaagaaacacctgataaaaaggaaatgttgtctaagatagatattctagttgatggccgctttatgaatgatttaaaggatttaaccctgcaattcagaggttctagtaaccaacgaattattgatgtgccaaagtcgatgaaggcaggcaaggttgtcatctgggataaattgcaaaaataagataaactaaagtccggaatgattttctggacttttttgctaggtgaaaaaatggaagaaaaaaatattaaacaagttgatcaaatcatgacggccttgacccaagtgattgatccagaattacaagttgatgtagtaaatcttggtctgatttatggcatcgatatcgaaggagataaggcaaccattaagatgactttaacaattatgggttgccctttatctgattatttggaacaacatattcaaaaagctgttctttcagttgctggaattaagtcttgtgacattaagctggtctggtatcccgtctggacgacagagcgtctttctagtgcagctaaaaagcaattaggtgtaactaaccatgatgatcaaattaagcaggagaaagccaccaaagagaagattatcgacttttcagtaccgatcaagaaaatggcagatgaataccctgactttgttcaaattatgtacgattgtggttttactagaattaaaattcctggattgcttaaaacggtggggcgtgtgatgaccattccattgggagctcaggcaatgaaacttgatttggctaaagtgaaaaaagcatttgaagataaaggatacaaggtaatcaatgactgataaaaaaagacaggacgcaatcctgaaaattttgcattatattcaaaacggcggcgattttgcgaccgcaaagaagatgtttcaagaagaattcgatcaggttgatgtggccgaaattacagcggcagagcgcgaattaatcaagcaggggttaaacccagcagagattcaatacctgtgtaatgtgcatgccgatgtctttaagggtaatatcaaggagaatgcggtaaatcctgattttgctactccggggcacccggtgcatacgattaagctggaaaatatggtactgaaatcattggttaatgacgcactcttgccagatttgaaaaagtatcaagcaggtcaagatacactggataaaatcagaaaagaattgagtgatttggcaacaatcgataagcattaccgacgtaaggagacctcgctttttccattaatgaataaatatggcattacagctccgcccgaagtgatgtggggcgttgatgatgatattcgcgatttaattggggatgcaagcaagattgctggtgaggagcatccagataaagatcagttggctgaggcaattaaaaaggcgagtcatgaagtgcttgagatgatctttaaagaggagagcattatgattccgatgattgacgaggtagctgatcaagatgattggtacaacgttaaacgcgaagagagtcagattggctataccctgattcgcaagccaatgaattggaagccaaaggaagctaaaaaagaagcagggcctatttctgttagcaatctttcatccttcctcattaattttgaagaaggaaggttaaatttagagcagttaaatgcaattttggatatgttgccatttgcattgacctttattgatgaacacgataaggtagcttattttggcggcggtgctgagatttatccgcactcgcgcaatgctattggcaatgacgtattctcgtgtcatactgctaaaagtagaccgttaattaaaaagatttttgcgcaatttcattcaggtgaagttgacaagtatgagtttcactttactccacacaagatgaagcgctgcttatacctacgctattatgcagtacgtgataaaaatggaaagtatctgggttgtcttgaggtagcacaagatgtgacagaaattagaagctggactgaagaaaagaaaaaaatttaacttgttgggctgtgttctagtaagggatgcagctttttcttttgccctcgtgcaaaaaatcacaattcttgctagactagattgagagaatgattaaaaagaagggaagagagaaaatgcgcacagcacatggaaaacaaccagctgatgaaatcaaattgcattggcttcttctaggccaattactaacgtggttgggttccagctttatttggccatttacttcagtttacctgcacgaccatcttggcgtttcactagctttagtgggtgtcgttttgctgttcaactgtgttgcaaatatgattgggtcatttatttcaggctggtgctatgaccatatggatccatatgtcttgctgattgtgggggctgctttagatgcggctgtcttgtttggcatggctttgaatcatagttggccgttatattggctctggatgactttaactggctttttgggtggctggaatggagcattgattaactcgattgctactagtattaaatctaagccaggtcgttatgtcttcaatatgatctactttgctcaaaatgttggggtcgtttgtgggacattagcagtaggttatctttatgattattcagtgactttattatttgtcattgctggtcttttattcgttggcgtttgcgttaacgcaattattaattatcggccaatgattcagttccacaaggagcgtttggctaacaaaggcgaatcaaagaagaagtcctttgagccgatgccaaaatacaatctgattatgtcaattggcttttttgttacgatcgctgtaatttggttgatgtacatgaactgggaatcaaacttgtctgtctacatggtttctttgggcattccttttcatctgtatagtttgttatggaccatcaatgccggaattattgtcatcgtgcaagctatcttaagtcgttttactatctttaagagcttatttagacaaattttatttggcactttgatgtttgcaatttcttttgttactttgatttttgccaaagattttgcacatttcgccttatccatggttatcttaactttaggtgaagcaaccgcaatgccgtcgattccaacttatgtcaatgatctgtcgcccgattctagtaagggcaagtatcaaggcttaaccttgtctgcatcgtcaattggtcgagctctaggtccattatttggtgggttaatcattgaagatttcggctatattcaattctttgctgttgctgcaattggtatctttttgcttttagtcatgcttattccaatgcatgcaaaactacagaaaaaactaaaattatttgtaaaataaaaacaacatgatagcgttaatttttttataatgctatcatgtctttatatgaaaaatttttccactagggaggtaatttaatgtattttaacgtacgcggcggtgctggtgacattactaaggctaatacttcagcgcgtctacaagataatttatatttggccgttaactcagaatggttggaaaaggctaaaataccatctgatcgttcaagaaccagttcatttgatgggatcgatcttaatattgaaaagaacttgatgcaagactttgcagattttgctgctggtaagaaggaactgcctactgtgcctaacttcaagaaggcagttgagctttacaaggttgctaaaaactttgacaagcgaaatgcggatggtgccgcacctattcaggcagatttgcacgaaattttagacttgcgcaacttcgctgactttaacttgaaggcagcagatttttacaagaatggttttgccgttccatttgctttcagtgttgaagcagatatgaagaatactaagattcattcattgaattttggtggtccaagtactttcttgccagatacgactacttacaagactccagctgctgagaagttattggatgttttgaaaaagcaatctattaagttgttaacaatggccggacttgatgaaaaggacgcagaagattacgctgacttggcaattaagtatgacgctaagattgctaaggttgttaagtcaactgaagaatgggcagattacccagcaacttataatccaatttcattggccgactttgaagcaaaattcgattccttcaagatggattacttcttgggcggattatttaccaagaagccagaacggataatttcaactgaaccacgttacttagatcacgcggaagaattgttgaatgaagaaaactttgacgaaattaaggcttggatgttggttaagttcgttaacggcgtagcctcaagcttgtcacaagaattccgtgaagctgcctttccattcagtcaagctttatcgggtcagccagaactttcaactggtgttaagcaagcatatcacatcgctaacgctgactttagtgaagttgtgggtgtctactatggtcaaacttacttcggcgcagaagccaaggcagacgttactgatatgattcacaagatgctggatgtttatgaaaagagaatccgtgaaaactcatggctttctcaagcaactaaggataaggcaatcgttaagttgcgcgctttgatcttgaagatcggttatccagacaagattgaagaaatctatgaccgtttgcaagttgatccagctgccagtctttatgaaaatgaagttcaattcggccgcgaacaaatcaagtacaaccttgaaaagttggaccaagatgttgaccggactgtttggttgatgccaggtaacttagttaacgcatgttacgacccacaaagaaatgatttaactttcccagctgcaattttgcaaaaaccattctatgacttgaaacaaagtcgtgctactaattatggtggaatcggcgttgttattgcacacgaagtatcacatgcctttgacaataacggtgctcaattcgatgagtttggtaacatgaagaattggtggactgatgaagattttgctgaattcaagaagagaacgcaagctgaaatcgacttgtttgatggtattgaatatggccctgtaaccttgaacggtaagcaaatcgtgtctgaaaatattgccgaccaaggtggtttaactgctgctgttgaagctaataagggtgaaggtgctgataagaaggcaatgcaagagttgtttgaaaactttgctcgcgtttgggcaactaaacaattgccagagtcaatcaagacacaagtatctattgatgttcatgcacccggtccagagcgtgccaacgttcaatcacaatgccaagaagaattctataaggcttttgatgtgactgaaaatgatggtatgtggcttgctcctgaaaagagagtagtaatttggtaagtaacttttctcccggatttaaaattgaagtgcaacactaagtgttaaacaaaaaggccatgaagacctaaacttgaagtgacgaaaaatcaagaaaggaagatctttatgaccaattcaaattctagcatttctaagcactatcatcaattaaccagcgtacaacgtggacaaattcaagcaatgctggattccggcataacttcccgtactgttatcgctcaagaagtcggctgccataagtcgacaatcagtcgcgaaatcaaacgcggaagtgtcctgcaaagagacagcagctatttattgtatgagcactattacgctgatactgcacagatttattatgagaagcgtcgcaaaaactgctatcagcgcaatccattgaagcattatgctgtctttttgagaatgctctccagacgctttaaagctaaatttgatgccaccagcatcgatgagttcgttggtgaattcaaaaggactatgccaggctacccttgtcccagcacaccaaccgtctatcgctatattgatcagggcttgctggacataagcaatattgatctgcctatgaagctcaaaagacgcaggaacaagcgtcatcacagccatggcggtcacgctttgcacaagaagcatcttggcaattccattgaacagcgtcctaaagagattgaagacagaaaagctccgctgcactgggaaggagatctggttaaaggcgtcagacgcaagaatcagcctgctttaatgactttgactgaaagaaccacacgctttgaagtagttatcaagattcctgactatcgggcaagcacatgccaaaggctgcttcaaaaggagattgacagacatcctgcctggtttaaatcaatcacgtttgacaatggctctgagtttgcggatatgaccaagatcaagggctgccagatttactttgctcacccatattctccatgggaaaggggcaccaatgagaactgcaatggtcttttgcgtcaattcttccctaagggcaagagcatgaaagacaagtcaaaagcttatgttcaacaggcaactgatgccattaaccacaaatatcgccgaatcctccaatatcacacagcagaggaactcttcaagcaatatatctcttcataacctaactgttgcacttaatttgacaattcaggtaagtaacttttcttaatatcgagtatgaaaaattagctaaattacatataagctcctataataagaatgactacagtgctgctactacactgcagccctttataacttattacccattaataaattttttgcactaaaaaaggctcctgttcggagtctttttttgatggttattttgttttagcgttggaataatcttttggtttaatccgtttaatataggatggatttggtcgaccaaggattaatggaatccgctcgatgattgtgtcagcgtattccaatcagaaccaggaagcaggattggaagaaaggttctgcaaacgaacacgagcttcgactaaccatttttcatatcctactaattgcgtttgcggactaattacgtcttgaacaattacgaaggcaaagtcaccaacgtcccgtcctggggtagtggtgtattcctgtggttgtgcctcgatcgttccgtcagcaatcaagtcgtgaacaatctgacgaatgtagacgttcacactggtctgcttcttgaatccaagataaagctgaatgttaatcacgttcttagtaccgtaagtgttaacagcatattcagcggtaaatggctcgttagtaacattgacagtgacaaaccagtaagcctttgctcgtttaggtcttttatccaaaattgagtacaggatttcacgtttgatgaacttattgtacttaacgttggccatgtaaaccaagttggtagcataagttgggtaattttcatcgtgacttaaattcgttaacatgtcggtatattcatctaagcgaacgtaagcattgcgagcttcacgcttgtcacgaaccttgttgccgtaataccaaacatacattacgaagccgatagcaccagcgatgaagagtgaaacgtaaccaccatgagtaaatttagtcaaacttgaaatcataaacatgatgtcaaggacaccgaagaagatcaagaagatccagttccaaacagtgttgactttcttcattactaaccattcataaagcaggatggtagtcattaacattgaaattgtaatggacagaccataagctgcttccatgtgagctgaagtttggaagtataagacgattgcgatagtagcaacacagatacccttgttaatggaaggaatataaatttgtcctttttcgttagatgggtagttgatgttcattcttggcaagaacttcaagcctgaagcttctgcaactaaagtgaatgaaccggtaattagggcctgagaagcaataacagcagcaatagtagacaaaatgatggcaaacaatctgatgttagctgggatcatttcaaagaatggattgagcacaccgccgtctgcaggacggtaagttgggttgttcaaaatccaaacgccttgaccaaagtagttgagtgacaagcaaacaaaaacaaatggccaagaaccaataatattgcttttaccaacgtgaccaacatctgaatatagggcctcagcaccagtagtagccaggaagattgatcctaaaataaagagacctgccttgttatatggactgactaataatctaatagcgtaaattggattgattgcttgcaagattgaccagtcaccgaccatgttcattacgcccattacacccaaaaaagtgaaccaaaggaacatgattgggccgaaggctttaccaatgatactagttcccattttttggatagaaaacagaactagcagaatgactacagtgatggcaataaccatgttttgagtagaaacgggtacattgccgccaaagttcagtcctttcagtccttcaatcgcagttgtaactgtaactgctggagttaaagtaccatcggccaaaatagcggctccaccaattagcgctggtagaaccagccatttagctcgttttctaaccaatgtgtataaggcaaaaatcccaccttctccgtggttagttgccttgagggcaataattacggtttgtaaggtagttagtagcgttacagtccaaagaaccaatgaaattgatccaatgataaagtcacgatttacattaccaatgccgccattgccttcgacaattgatttcataacataaagcggactagtaccgatatcgccgtaaacaataccgatggcgatcagtaagccagccgcgctcatgcgtttagctttattattcatcatctcgttatctcccacaacaaaattgtagttttaataaaaaaagaaaatgccacgatgacattttcccttgttgtacctattttcgtctatttcgctggacaatgcaagtgagatttgtcagaaattgaatctagaatttggtgatgataaagttagtgcattataataaagtgtattacgatacagcagatttgggaaatggaaaaaatgcttgaatgtaagctgattacctttgaagaaatgtaaaaaatatgcagtaaaaaagctcccatacagggagcctttttgatataaattatgaaagtgatgaaggaatcttagtacgttggtcttcgtcccatttttcccatgcttcataagtaagcatttcttctggcttaacaccagtcttttcttccatggccttaagcaagtccttaaagttgtagtcgtggtattgtaacacatgatcaaccaacttcttgcgtgggaagtggatgttgtttaaaacatagcgattgatatcaaccatgttatgattttcatcgtaaaggttgataacttcaagatcgtcttcatcgaattcagcgatgtagaagttagcgaagacctttaagtaatcaggttgttctttgaattcttcctgtggcatagtagtcttgttagcttctggcattacgactttaaagtcgtcgttttcttcattttctttatcagcttgagcttgagcgttcttttcttcttcagtcaaagttgttacccctttatttataaataaatagatacaaagtcaataataattttacagacttctacaaataaaagcaaatagaagtggttgagagatgcaaaagtatagaagtcagttttgattagtaaaatggagtaaaatgaagtaaaatataaatgtaaaaagtaaaatgaagtaaaatgaggaaaaatatgtataatgaaaatccttttgatgctgaatttggcgggatcccagagctatatcttgattttaatgatgatgcagttaaatttgctcaaagagcccatcgtctcaagaaacatccaacttattctctctttattacaggggtacgaggttcaggaaaaacagtttttatgaacaaagtgggtaaagaactaaaaaaatataaagatactatggtagtcactttgcacaattctgatgatctttttcgaatgatgtatatcaagctagtgcctatgctagataaaatcaaaaaatggacgccatcaatttctattaaagttccttttgtatcagtagatttcactgaagcaaatgaaaagcatgatgaaatatattataaagtagaaattaacaagattcttaaagctttgaacaaagtggggattcgtgttgcattttgtattgatgaagtgtcaaatacacccacaattcaaaaattggctgaggaattcaacgactggagcctaaataactatcaagtttcagtgattatgaccggactattaagtgaagtggcggaactatcaggcacacataatttaaccttcttggttcgggcggatagatttcacgtctctaaactatttgcgtcgtcaattgccagaacttacatggatgtattagacataacagctaagcaagcagaaattttggcagatatgtcaaaaggctatgcttatgcatttcaattgatcggagatttgatgtatgaaaatttaagtcaaaagatgacgtttgaaaaagctttggaatatactaaacttagattccgtgatgtacttttcaaccaagcgtatgatgtaattgctcatgaattaacggatgtggattttcaatttttgtacgctatggcgcaagataatagtattagttcaattattaggactatgcaaaaaagtaagcagtatgttaatagctatcgtgcaaaattaattaaatatgatctaattaagccaataattaggggaaaggtcggctttaccttacctttgtttagagatttcattcaagcaaagtatgatgagcttaactggggctagaatttattgaaaaaattcggcagaaaatcacagaaatgaacgcagatccagtttggagggatactattatggactatgagactaagctagctgaagagcgtgaatacggtgaagaaaaaggaattttaagtgcaattaagaaaattatttatcgtaaccggagctatggtgtatcagattccaaaactttggaggatctgacagaagactaccatgattctgtttcccgggatcaaattgaacaaatgatgaaagaagcctaggtctaatgaaaatagccgctgctcaatgtgagtaacggctatttttttacttgttatcatcagcagcagagctggaacttacggcagatgattgatcgttgcttgaggaagccgcgctggattggttgatggatgataatttaagtaattattcttttgaaaaaatatttcttacttgttggagtaaattatcgaattctgttgattcttttatgtggccgattatttttccatgacgggcaatgaaatcatacgatagcatttgaaataataatgcatctccatttgtgtgactagcataatctagcacatagaatctaaatggatcatctgtaatatggttatgagtaattgctagtcctattactaatccagactttttagtgtaagcatgtctgctcactactaaatagcgtctacgaatatttcctttttcagaatcatgtccacccatttcgtgaccagcatgtggttcagcatcgatcattattatgtcaccttgatggacatcaatccttctcatttgctagttcctttccgacaggtttgacttctctaggattgtatcctaattcttggtattctcgctttatttcagtatcataatcataatcgtcataagcggggtctgaccataaatcataattgtttttagcaattcttttgtatacaatatcaccgtttttatttacatcaacagagaattctgtattaagtggaactttgatagtacttggaatggtaagcactattgaatttccttgttttctagccttgactaccataataagccctcctcgtattatataaattgtaattagtcatattgtgataattaatcaaattagtatttgctttttgatcttcacatgttagcctctaattgtcattggctttggtcaactggtctaggttatcacctcctgcagttttgtctgctttataagtctgccacccagacagttcctttatgctctaactcacatgctgtattgattgcttctttttgctagtccttgagcaattgggattaggtgcagctttcaaagaagcaaccagtgaatacttatactggcgagattgaacttaagaactgtaattaggggttaacatgtgaagatcaaaatctatgatcagaaatttgaaagaaaggaggccatttccaatgaaattatttgtcggtattgatgttagttctaaagatttacaggtcgttgcacttgattcagaagatcaaaacaaacgcttaattaacgatagctttgtcaatgatctttatggtgctagtgaactgaaaaaacaaattttagatctagctcaaaataaacactatgatcaaatcattattgtcatggaagctacatctatttacagttttcatcctgcttactttttccaaaatgacgaagatttacaaaagctcaatgtagagactgatgtaattaaccccaaagaaaccagcaggtttcataaagtctttgaagaaagtaaaactgatcctctcgatgcttattacattgctttgtatctaagctttggacattatcgagtaagcattgccagacaagacaactatcttgctttagagcgtttaacgcgtaccagatatgaattagttcaagaactgactcgtaccaaacagcacttcattgaagctttatattatcgggttaataaactaatcactgtcgataaagataagattaatactcctcttttcggtgctacaatgatgtctattgtaaccgatagtaaaactctggatgagatcgcggatatgcctaccgaagacttaatttcttacttacaggttaaaggcagaggacgcttttccgatccagataccttggctaaagcaattaagaaagctgttagaggttcatatcgcttaggcaaagtaatgactgattcaattgatgcagtgctttctgttcattacaacatgattcaaagctttaatgaatctattaaagatctagaaaaagcaattgatcgtatcgttgatgcattaccagaaagcaaaattctggaatcaattcccggtattggcaaaacctatacagctggtattatcgctgagatcggaagtatcgatcgctttgataaagaagaacagctggctaagtatgccggcctaacctggaatcaatatcaatcgggagatcacagcaacgaacatactccaatggccaggactggaaacagatatctaagatattacttgattgaagctgccaatctagcaagattacatgatcctgttttcaaaaaatattaccaaaagaagtatgatgaagctgtctactcgccgcataaacgtgcttgcacattaactgcaagaaaattagtacgagttatctttaaattgctcaaagatgacaaactgtacaggacaccgaggtcttaatttcaaaaattggtctaaatttaaaagtaaacaaaagtttaacattaaaaaaatcaacctttaccaaggcttagtttcatatactcaaatttatgatcaaaaagaacaaatatcatcgcctttcatttgacttattaccacatgacttatgctaaaaatattttattatttaagtatatactgtgaatacagtgagcacaaacaaaaggagccacaaattggctcctttttcgtttgcttacttgttatcatcagcagcagagctggaacttacggcagatgattgatcgttgcttgaggaagccgcgctggattggctgctggatgattgttcctgctggtgatcgcttgaagaagatgaagaacttgattgatcatctgacttcttgtttgatgagctggacttcttggactgctctttatccttatcagatgaggattttgcagaatcatcctgactagaattatctttgttagaatctgcatcagaattattagatttttgctggtcaggatcagcgttctttttattggaattattataggaagtattattgtgcgtttgagtgttggcatggctaatgtaagcaccggcgccacctccacctaagatgaacatcgcagcaataacaccccaaaagactaatttcttcatattaagacaactctcccttatcttagaaaaaatattaacgaatttgagccaattggtgactttgaatcgttagttatagtgtaagacatctggccggcaggttgattacaaaatactcaattttaactaattattaagaggtagaagaaaaatatgaattacgaattaactgaacaatcaatccaatatgtatttggcaacaagaagtataagaatgggcaaaagacccgtaacttgaagaacgtaaagactggcgctaaggcagatgagttgcaaaaggtgggtcaagcaattgctagtttgcaagaagactcacttgatgaagcatacttagtgcagaagtcacgtcttgtaccagcagctgaataaattaacgaacatatttaggaaataaggagaaaaaatgatggctaaaactactaagactatgaagttaactttcttgaacggagaaaagaagaaaattagtattacgttggggatgcagtcgataatctaactgcggatcaagtacgcggtgcgatgaatacgattgcggaagccaatgcattcgagaaagacggtgttgcatattatcacactcctcaatcagctgcatacattgaacgcactgttactgatatctttaatgattcagcagaatctgcagttgagcctgcagctaagcaagactaatctggacttgcttgaccaactaattagcttggtcaaaaggctcaggagaaaatatcgcaagatgtagagttcacacttagacctttaacagaaatcgtatagtaatattactttttcaattgattttgttacatcgttgtaaaatttaagaaaaagtaaagaaacagtaaagcgggcgtatgctcgctttttcttgttgtgtctaggattacggcattttgttattttagatttgtgtgaatggtattgggatagggaataggtgaattattacaaaagcaagattgtagtcaatttaacttgctattttttcaagaggttagtacaatatgaatcgtggtaagtaataggacgtgcttcaggcgtgtcgcctgtacgcatgctgatccttcagcaatgactactacctcatgagagttataaactcatggatcttgctttgaagaattttgtacattataggctccctacatgctgaacctatggcctattacattttttatatttcaaggaggaaaagaccacatgaagaaaaatttaagaattgttagcgctgctgctgctgctttattagctgttgctccagttgctgcttcagctgtttctgttaacgctgctgcaaccactaccaacacagtatacactgtaattaatgctgatggtaccgcaatcaacactccagctgatgcaaaatacgatgttgatgtaacacctaaccttactgctattgcagcttctactgtaaatggacaaactattaacggtagcattactggtaacattactgctagttacaatggccaatcatacactggtactttagcttctaagaatgataacgctgctgctactgattcaaagggtaggacagttactcattttgcaaagcttgctaatggtttatatactgttactgtaaagggtgtatcattcaactttggtattgctaacgcaaacaagactatcactcttggctccaagaacagcaatgttaagttctcaactgatgagggtaagagctttgctaacactaaagaagttgaacttaaccaagatggtactttaaagaaacctatttcaattcaagtttcaaacgttaatgcacttgacctttcaaatgctagcggtattaacttctacaacgcttcaaacggttcacaagtaactaagggttcagttaatgtaactgctggtgttaacggtcgtttgaacgtttcaactgttgctagtgaaatcttaaagaactttgctgcttaccaagtttcaaatggtaaggctgtatcacaaatgccagaccaaaaggctgtagttgctgatgttaatgctgctttaaaggctgctaatattccagttgacaatgctggttggtttgctgctccaacttcattctcagttaatgtaaaggtaacttcatcaattaatggtgttgacgctactttacctgtaaccgttaatgttgctaacggcaaggacactactgtaccaagccaaagcaagactattatgcacaacgcttacttctacgacaagaacgctaagcgtgttggtactgacaagcttacccgttacaagtcagtaactgttgctatgaacactactactatcaacggtaaggcttactacgaagtaatcgaaaacggtaaggctactggcaagttcatcaacgcagacaacattactggtactaagcgtactttgaagcacaacgcatacgtttacaagacttcaaagaagcgtgctaacaaggttaccttgaagaagggtactgaagtaattacttacggtggtacttacacattcaagaacggcaagcaatactacaagatcggtgacaacactgaaaagacttacgtaaaggcttcaaacttttaattaagtctatgtagtagataagataaaacgaggcaatttgcctcgtttttctttttgctctagaaaaaggtaccgcttgttgcgacaccctcggaaaatattattgttataacctagctctgcttcagaaattcttctaactgtttatcagagaacacattgccatacttttgctttaattgttgcaggatttgttggctagtgcagccaacatctttcaaagaagcgactaatgtaagtgcacctgttttaaggcctttcttttcaccaacttgctcgcgttcaagcattctagtttcaaaatccataatagtgtccctccattctggatcggcattcattgattcgatgcgtttttgtgccttatcaaagagtttatcgccatgtaccggtaaatctttcatgagtttgactaaattaagtaatgtttcagtctcggttccatcaggaactccgtttgaattaattataattttagtcaagccatcctgcaatatatctgcatgattgtctacattaatagtttggtatgtagacttgattgcaactttttgcttagttttgaacgtgcaaagaaaaataatgaagacatttttcaaattattgtaagtatagccctggtggagagtatacctttgatcgtttttcgaagcataatagcgcatgcgacgggcaatatcgtcatcgtctgaccgctgcatctcaatattgtaaaggttgccgttaatatcctcaaccaaaatatcgagtcggacatctttttgatcccgatgctcaggatcgatgattaattcttgcttcttaggcggaaagatcttcttaattaggatctccggcagaattccttgcaaaacatgcttgcagaaagctggattggacatgatttcgccaaaaaccttatcttctgaaaaaccaaaccataattctttttgtttgtgcgtatttttcattgcgcacctctttctaaaaaatagtaggataaaatgtaccctctattatttattacgcaaaaaatcggcaaaattttttataaaattgtttttttcagcataataatttctagctatacaatcaatgcttcatactgtataatactattcaatatttgaaacaatatagatatattcaaacataggtagtgtgatggatgtgtcagcctacaagcaacgtaacttggggattattagcttgcccactgacataaaatatcgtaattggtccaaggaccttaccaagcggagaattgagaatgactcgcaattagagcaatacatcaagtatgacaataaatatcgactcaataagaacacattggcagtctatgagttcaagcaaaatcctatcttaggcaaatataaggcagtagccttcgacctgaatcgtggaattgtgcttagtcagaagtcaacacatgccatgatgcaaggattgatgcggcatgccgtacattgcgatatgatttggcagagaatgctagctcgcgaggctggagttgatatctatcaagggattgtcatgtacaatgtgctttatttttcaatgcatgcatttagtggaaacttcttcacggactggatttgcttgcactggattaaagacttccacgtcaaacgccatgatcaagctattttcaacagtattgcacttgatgaaaacggcttggtttataattttgcttttgattctcctaagcccaatcttacgaagataattggtcagtatctgtttcataatcattattattctgacttatattatcagcatatgttgcaagaaaataatcttcgcgtaacagccattaattctgattcaatcctgcataattctaactattatgtgcaactggacttgtacgctattgatagttttaaaaagctggcagacaaattctacaatcatgttttgaacttacacctacttacgattgtgaaagaatttaagccattagattatttgcaccgtgaacaccgcttttttactaaacagattattaagatcagatataatcgttaacagctctcatgagctgtatttttttgcacttttttgactatcatctgttcttcgtcaggtactatctgacttgactttgcttatcgtagaaattaacaaacacatgcgacacttgggattagagcatctcaccactaagtttttttgcagatccaatcttgctaatctaatagtgcacaagcgcttgtgacatcatttaggagagtgtcacaatgacaagtcaaaaatatttcgaagaagcatggaaaaatcgtaagttagttggtggtgccttaaaggcggcacatgttcgaccggactatcatctctatgaagatctgttgcaagaaggtgtaattttgtatgccgagatgttgcgcaaattagatgggcaaaaggttcgcagtgagattgataagcttagcttcaaaaaggttctttggcaaacaatcgatgctctgcgccgagagcaacgcgtatgtgaacgcaatactgcaattgacgaggcttatgacttaggtaaaacagaggcatgggataatcttgtagctttaaagaatgagattaagaaactaagtcaacttgagcaagtaattctttttgagcatttgcttgagaaaaagacaattacgcagctagttaaagaatgcggtataccgcgtattacgttgaaacgattgaaaaagcagcttttaggtaaattacgtaatgtgatggaacaataagttcattttgtaacaaaatttaatttcataaaaaattttacctactttttgcgtaataagtagtagagggtaattttgctgaagcaataattgaaatgaggtaaaatatgattaaaataaaaagtcgatatccgagaagcactgacgatttggtctttggtcacgtcatgagcaataagaagaattgaatttcagactggtacgcacgttaaagttttcaattctaagggcaataatcatgacctgaaccaaaagataattgacttcttggattacatgaatggaatcatcaatcaccctgaaggttacatcgccagcttgcaaaaggatgtcgaccattacgtgaatagcggaaagtgggtcgaagatatggacaagttggaatatgaaatgaatgaagtcgctaggaaagtaaaaatagaagatgctaagaagctagtcctagtcattaaacgaatgggtggtactaaagacactgccttacaagaactcacaaacaattacggcgatatgcttagccatgatgaaattatcaaactagtacatgaagtttatcagtaaacagtaatcaataatctacagtaaaattatctttcaaaggtgtcgcaacagcgatgcctttttagagcaaaagaaaaagttcccccaattttatgttttataaaaaaaacagtatctatgctaattatggttctcaaattgaaaaatggataatttgatgttggaacaattgatggtattcaagttaaatactgcttgattggttgttagaagagtaaaaaagccatttcagtcacatttttgctgaaatggctttttctattttccatcttttaattatattatcttgaaatgacctcttcttatcctgaagtgtagtctaccaaaaatgtcagagattatttcgttccttctcgtagagtaaattattatcctaaattctattctcgttaatcatgctatcaggcaatataattttcattcgatcatcgaacatattgaagtttacctcagagccttgaatctgataatcataatgaatcaatgcattaactaaaacctctcgaataaccttaaatggtttaaatatttttatattgcacctgtatcataatgataaaaaagttaacgaatgcaactcgttagctctagtcgtagtctaagataactattagcttaatttttaagagcaaaagaaaaacgaggcaattgcctcgttttaaattattttctctttttagtatgtttgacagttttcttatgtgcctttttgtgattcttcttatgagctactttattatgtttcttcttggtaactttcttcttgcttactttaatagtatttccagtaatattacccaaactagtatgacttaatcgaccattcttgaccgcaaaatcaaattcaagattaccttgtgcaagagtactgtgtgcattaacactagcagaaccaataatttcaccattgttattaacaatagtaactgaacgatcagttgaagttggcgtcaaacccattattgttacttgtgcatttaaagtatatttaccattgtttaaaactgcatcgtttgtttcaatttcagtaccagtattattagtcaaatggatgttattaattgaggtagaagcactaattctagtgctgtttgtgtatacacttctatcacgaagatagtgagtgacaacactacttttagttacaactgcagctgcttgaatagtatttggggcagctaccaatgaaactacaggcgatgcagcgaacaaagccgccgctacaatactagtaaatttaaaattctttttcattattatttcctccaaaaaaagacagagctttcgctctgcctttcttatttgtcagcgtataccacagacttaattaaaagtttgaagcctttacgtaagtcttttcagtgttgttaccgatcttgtagtatcgcttaccgttcttgaacttgtaagagccaccgtaggtaacaaccttgtcacccttcttaagaacaaccttattagcacgcttctttgaagtcttgtaaacgtatgcgttgtgcttcaaagtacgttcagtaccatcaatgttgtctgcgttgatgaacttgcctgaaagcttgccgttttcaactacttcgtagtaagccttgccgttgatggtagtggtcttaggtgaaacagttactgagttgtaacgagtcaacttcttgtcagtatcaacatgcttgccgtccttgttgtagtagaaggcgttgtgcataatagtcttgctttggctagcaacagtagtatctggcttagtagcagttaagtctgaactcttaacgaattcgtttgagccttccttgttgatacgagtgtattcaacaccgttaacagttaccttaccgaatgtgtaaacagctgcgccctttgcaagagctggaatattagcagcttctgaaacaacattaccgttaatgttgtaaactttagtattatcagcctttacgtattcttgtggtgccttttcagtaggacccattacaattgcgtaaacagtaagctttgaagtaaagccagctggattagtagcagtaatagttactgggtacaaacctgcaacacttgggttaaccttgcttgagtcaatcttaatattgcttgagttgatcaattgttggtgagcagctaattctgctggagtcttgtcgaagccagtaccataggcactttgtacgtaagctttaacagcaccagttacagcatcgttgttaaatttaccatttacaataactttggtcttgtcagtgtccttaagtactaagttacctgaagttttaccatttgacataacgttgtcattgtagtaaacgttgccgtcaaatacaaatgcaggtgcattgtagtttactgatgcattaattcttacagtaattgtagttgaattaccattttctgacttagcagtcaacttaaggttgaaaccgtttgctggataatcaaagttaccgtttgaagcacgcttcaagccttgagctactaattgactttctacatctgaagcggtagtagtcatattaatagtgtcatttgattgatcactggtcttccaagcatagtgcttttgaatagcattcaaaagatctgatgaactaaagccgttagcaatttcgtttaatgaaacagtgctaccatcgtttacaacagtgttagtatccttgttgtagaagtaaggagtaccttgttggctagcgaacttagcatttaaagtaacttggtaagctttgtcattaacagtgaatgtaacaacttgttggaattcaccatttgagtttgaagcagatgctgacttaacagtaatattcttcatatcttctggcttagcatcctttaatgcatcgccacctaattgtaagatagcatccttttgagcatcgctcaatttgatactgaattgagtatttgaagcacggtcaagaacaatggtgcctcttaatgtaccaaggtcagtaacttcttgagaagaagcaggtgcaacagtgttggtagtggttgcagcagcgttaacagaaacagctgaagcagcaactggagcaacagctaataaagcagcagcagcagcgctaacaattcttaaatttttcttcatgtggtcttttcctccttgaaatataaaaaatgtaataggccataggttcagcatgtagggagcctataatgtacaaaattcttcaaagcaagatccatgagtttataactctcatgaggtagtagtcattgctgaaggatcagcatgcgtacaggcgacacgcctgaagcacgtatattgtgtactcgatttttttcaagcaatgaaagggtggtttctgtcctcttatttgcttggggtcggttgggtgggttttgtccgctgcgcagatacttttatgaaaaaagagtacgatgcgatttgatgatttagagtgtcatttttggttttgttaagggatgcttgtaaaataataaggtaaagaaaatctaaagaagtaattttgtgaaaaagaaatcgacattttttgcgtacttatatattgtcaaaattaagatatgtaggtgataactatgttaaataaaaaggataaaactaaaattcaagaattaactgataaaacagtggacttgatcgtagaaaatatggggaaatcgcgtaaagaagcggaacaagattttcaaaagtcagatacatatgcgttcttatggctagcgaagcgtaatatcgaaaatgcgcaccctattattttgtacagaatgtttaattctgagttaaaagctaaaccaatagacgaagaacaacaaagttttattgactttatgactgataacacaatcgagttaattacacagaatactaattttggaagataaaaggcaactaaagttttcaaatctacaaaggtatattggatactagttcactcaggacataatttagatgaatcttctcccgaagagctgtttgatatgtttagaaatgaacttagtataggtaatccactaccttcatctatgctgaagttaacttattaaaaaatttatataagttaaataatattattacaaatgttacttttttacgacaaatctgttgaaacgcttgtctagacctaatttgatagatacaatggaggtgttatattaaggaggataattttttatgaagaagagacttttgaccagttttgctgctgccgcaatgcttacttctgtagctgtgccagcagtaaatactacgatgatgaatcaagcctcaagccaacgagtttctgccgctaccgctgatcaaactgcatttttaaacaaggctgccaagcaggcagttaaagcagctaaaaaatatggaactttgccatcagtgatgattgcccaggcaataactgagtcaggctggggaaagtcaggattagccgtgaatgctaataacctttttgggatgaaggctgatgattcttggacaggtgagacttatactgccaagactagagaagaagataaaaacggtaagagctactatattactgctaagtttagaaaatacccatcttttgaacaatcatttgaagataatgggagtaagttgagaaatggtgtttcttgggatccgttgcgttataagggcacttggattgaaaatgcatcaacttatgcagctgcaaccaaggctttgaccggtacgtatgctacagactctaagtatgataaggcattaaatagtcatattactagttctaatttgactaagtatgatccagtaaccgttaatactactagaacttatactgctggcaaggatagttcaacttataattggccaactgctccatctgttgccagtgctattggctctgttaaagctggtgaaaaagtagtagttaccaagactattactttccatgatggttcaagcagaatgtatattgatggtcgcggttgggttaatggctcagttttggacaagagcagttctgcaactaaggaaccagtaactcaggcacctaagaatgtgccagctgtttctaagaacttgatacataatgcctatgtttatgaccaaaatggtaagaagctaaagggcaagatgtacaagaccagtgatgaaaacggtggtaagtggatcaatacttatggtaccaagaccatcaagggtaagacctactaccgtgtcggtgaaaatgaatacattgcagctggtaatattgatggtagcctcagattcttgaagaagaatgcttatgtttacaatcaatatggcaatcgcgataacaatttgaagcacaagaagaatagccaaattgctacttacggcagtgctataactatcaatggtaagaaatactataaggtaggtattcgtcaatacgttaagaaatcgaacttcatgtaattaaggaaagggctttgttgtgaagatacgcaaatttttaattgccttaattgcgcttttggggttagtcggcgtatcatcggtcagtaaccaggtcaaagccgcttcgattaatactttagcgaagaaatatcaatatagtggtgtcacctatttatacaagatgctcaaactagaggggattaagtacaataaattccctggtgttgagtatcaaaatggcaagccagaaggaattgtcgttcatgagactgacgatcccggagctactgctcacgatgaagcaatctactttaaccgcgagtggaaaaatatcaacgcttacgtcaatgcttttgtagatagtaagcaagtcatccaaatgtattcacctaataatggtacttggggcgcaggactgaatgccaacaatcgctttattcaaattgagctttgtgaagaagatagtcgtgatgcctttgctaagtcagttaataatgatgcaatttatattgccaagttgcttcatcgttacaatttaaagccagacaatgcttgcgatgatggtgaaggcacaatttggtcacacaaggcggttagcaccttcttaggtggaacagaccacgttgaccctgatagttattttgccaagtgggattacgacatggatcagttttattctttgatcgagtattactatgacttgcaaaagaagaatgaaaatactgatactaaggatccaaataagattaaggacgaagtaccagcagaagttcaaggtgcggtaactttaggtcacgatgcttatgtttatgacaagaacggcaagaagaccaagatcttgaagttagctggtagtccggtaaccgttttaggctacaagataatcagtaataagaagtactatcaaattggaaagaacgaatacgtagtagctactaatattgatgctactgctagaactgttaagaagaatacatatttgcggactcgttcaggtcgaattgaaaaaggtaatttggtcaagaagggtagtcgggtcatgacatatggcagcaagattacaattaaaggtcaaaagtattatgctttaaatgctacacaatatgttttagttagcgatattaattagaaaaatacgtcttaaaccataaataatgggaattaagacgtattttttgtataattcttgtgttgaatgtgaaaagaggagaatttaatggcgcaattatcattatttttggtcgtcttattagcgctcgtaattccaatatttatggcgcgtttcaaaataagcactgtaccaacggcgattgctgaaattatcgtcggaattattgtaggttcgagcggatttaatatcgtggtttcgatacatgatttaacatttttatcgaacctcggcgtaattttgctgatgtttttatcaggaatggaaattaattttgacctgctacagcgcaagaataatcctaaggctaaatcacaggcgggaaaaactgtcgatccgttgccaacagctttaacagctttcgctggaattgtggtaatggcctttgttttggcatatgttttaaagctgatagggctatttagcaatgttatcttggcagcgattatttttatgaccattgcattgggtgtagttattgctaccttgaaggaaaaggatattcttggccgaccgattggtcagacaattttgttaactgcggttttgggcgaagtaataccgttgctcttattaacgatttatgcctcagttaatggagggaatgctggccagctttggttgattatcttactgtttatcgctgcgattattcttttgcggcggtttaagcaaccgtatttatggtttagcaaagtaactaaggcaacgactcaattggatattcggttagccttcttcttgatttttgctttagttactgtagctgagcgagttggtgctgaaaatattttgggagcattcttggccgggatggtaatgaaattattggaaccaagcgaggcaactaaagataagctaacttcaatcggttatgggttctttatcccaatcttttttattatgactggcgtgggcttgaatttaaagtcactatttgctcatccatcatcattgatgttgttgccagttttggtcattttcttgttcttagctaaagctcctgtagtttttctttatatgcgctattttgaaaagaaaaatgcctttgctggtggctttttaactgctactacaattacgattgttttgccaactctacaagttgctagaaaattgcatgcaattacttaaacacaatcagatgcctttatcttagctgcggttattgtttgtatcgtgagtccgattgtctttaattcaaactttgttttatcacctgaggatcggatgaaagaaactgttactattgtgggtgccaatacttttacggtaccagttgcacatgatttgcacgataattggtatacgatcaagatgtttaccgatcagcaggaccaatacgaaacttatgatagtagggttaaaggtttaacattacttgataatttggataatcaaagcttagagcgtagtggtgcctttgattgcgacattttcgtagctgcagggcatcatgatcaagaaaatgcacgaatggcggaatatgccaaagacttgggagtcaaacgagcaattgcccgaatgaatgaagtcgatagcgatacgatggctcgatgccaggaggcaggagtagagttgttcaactttactaatgtacgttctgctctgatgcgagctttgattgagtctccaacggtctacaagattatgactgatactaacaatgtgttgtactcagttaaggtgagaagtacttcctatactggacgaccacttagggatctggaatttgtggacaagattacggttagtcgaattcggcgtggtgatgagtggttaataccacacggttggactgttattgagccgaatgatatcttgatcttttctggagaatttaaggttgctgatcgagtaaagaagttacttagtcatcaaaattagagataaaaagaggctaaatgcaaaaatcctgcatttaacctcctttttacgtaattaatgattttgtccttcaactgcttcaatgtcgccttgtccatcgcgttcaacaatagccccaattgcagcgattaagcctttaacaatatcggctaatgccattgatggattgcttggtcttttgacaacttgttctggcaaaaatgggatgtgaatgaagccagctttaaggctagggaattctttagctcgcatgtattgcacttgataaaagatgtggttgcagacgtaagtaccggcagtgttggaaactgtagcaggtaaaccaacagcgcgaatcgccttagccattgccttgattggtagttgggtgaagtaagccgtgtcgccatcggcttggataggttcaccgagcggttgataaccatcgttgtcggggatgcgaccatcgttaatattaatagctactcgttctggggttaaagcagcacgcccgccagcttgaccaacattaagtacataatctggtttttcttgcacgatggcatcatgaacaacttgggcagatttattgaaaaccgtaggaatttctaatttgataatttttgcacccttgattgagtcaggtagttttttgactgcttcaatggcggggttgatcttgtcgccaccaaaaggatcaaaaccagttactaaaattttcaatggcttttcctccaaatttaaatcatagaattttttgctttagtcaaaatttgcattgtctctaaagtattgacaaatgcttcatccgctttttgcgtatcgtgttgatcaatcatctgggcaaaagtattaaattcagctgccattcggtgcggatatttatttaaattataacgcttaggttgctcatttctcatttcaactgtgaaattatcaagtgttcccgttgagccgtcaaaatagatactacctttttcaccttcgataaaagaacgtggcgttacatagctatcttttgatgccgtgagggaggcttgtttgtcaggataagagaggtgaagaataccagaagtatcaacgcctttttgcatgttggcataatattgcacttgatcaggcaagccaaacaatgccgagacaagatgaatgttgtagatatttaaatccattaaagcaccgccatcttttttaggatcaaaaaccggcgcaattttgccttcaagaaaggcgtcatagcggctagaatattgcgtataatttaggttaacaatatgaattggtgcgatcttgttcaattctttttggatttgtttgaagttttctaaataaaggttagtaattgcttcaacgatgatcaaacccttttcgtcggctaacttttttaattcttttgcttgagtggtgctctgaacaaatggcttttcacagattacatttttatcgtgttctagagcggctttagcaatctcataatgcaagaagtttggcaccgctacataaactgtatcgatttcagaatcagccattaattcttcattgtccgtataagtacgtttgatgttgtactttttagctaattcccgggcaatattttcactgcgcttagttgagaaaatagccgttacagtcatattcgcaacttgatcagcggttgttaaaaagtcatggacgatcatgccgctgccaataattcctaatttcattttttgcctacttctttttagtattagtggttggtaaatctttagcattagctgcagagtctggcactcttaagaagtcatggctgccgaagttgccataactttgaccaactttaacgtacattaatttacctagtttcatattaacaaagacattaaaggttgataatttattacctttaattacagccttaacattcattgattggtacttgcctacttttttaatttggctgaaaattttagcttgatttgtactttgagcagtagtgtcaaaaattggtgctgctgcctttttcatcaaagcttggtcagtacttttagcagttaaagtataagtgtaaacaccatcttttttgctttttttcattttataagcagaaaccaacttatcacttggattggtgatcatgtggttattcatgatggcatcggttaagtcggcataattatggccggttagtttttcaaggtcagccttgtaccaagtatcttgtccattaatgtagacattgttaaggttgacccattcctcagtagaactagttttacctttgctagtagtttgattggtgatgtggtaaacagtggttttaccaccaaaggtagtgttagctaaggcaacttgattagaagtgtcggtacccagagtaacagattgaataacctgtcccgacttgaagctacttttagctttttgtacaacttgagtcttagtcagagctgaagtagccttcttttcttgtttactgcagccacctaataaaaagaggacagcaaaggataaaccgataatcgttttcttaagtttcatttttttctcctctatgcttcaataagtctattataactaaaaagtccgttgctcgttggagttacggactattcttttactttattttgtattaattttgcctaaatctacggccgatttcttgatagaagcaggtaccgtcaactttttgacttgattaatttgatcaatctgcatggtgaaattctttttgtgtccttcatccttataagtagaagtcacattaacatttttgatgtcgtaattctgatctacgttaattttgatttcgttgctaattggtttaacatcatcaagatcgatgccgattaaagcagtaaaggcagaatcagatacaattgcgttccaaatttttttgttatttcctttataagtaagcagataatcattgccgttttgctttaccttaaaatattttgcgttagggatgaaaggcatgagtaatgtgccgttcaaattgtcggtaatggcaccataggcactagccttagacaactttgtcttaaaccaacgctgagaattggtacctttcatttggatatagttgcttttaccctcaatccacattttatagtgattagagctgctagaaacattagcataaataatcgttggctttttagtatattgggcttcggctttttgcaaagacttgccattgcttaattcattccaagtagcgtgcattgaactgaatttcgttttttccgcactggttaaaatcgtcttggcagtaggtaaattagctgtcttttttgaacctgtcttagagcaggccgttaaaaagagtaatgctaataaaacggtaatgataatattttgatgtttaaatttcatacataactttctttcattaaattttttcttctagtatagcaagaataacgttacaaaattgaaaaaacacgatttttttagtcttaactctatgaaaaaatttgtgaaatgtgtaaaatatggatgaaacattgaattttaaaaggagatatttcatgtcaaaattagttttaatccgtcacggtcaaagtgaatggaacctttcaaaccaatttactggttgggttgacgttaacctttcagaaaaaggtgttgaagaagctaagaaggctggccgtttaatcaaggaacacggtcttgaatttgaccaagcttacacttcattattaactcgtgctatcaagactttgcactttgcacttgaagaaagtggccaactttggattccagaaactaagacctggagacttaacgaacgtcactacggtgctttacaaggtttgaacaagaaggctactgctgaaaagtacggcgatgaacaagttcacatttggcgtcgttcatacgatgttttgccaccagctattgatgatgacaacgaattcagtcaagcacatgaccgtcgttacgcaaacttggacccacacatcgttcctaaggctgaaaacttacacgtatgtcttgatcgtgtaatgccattctgggaagaccacattgctccagatttacttgacggcaagaacgtaattatcgcagctcacggtaactcacttcgtgctttgactaagtacatcgaaaacatttctgatgaagacattatgaacttggaaatgaagaccggtgaaccagttgtttacacattcgacgaaaacttggatgttgttaacaaggaaaagttggacgactaatttattaagtagttattcacacaaatagaacttcggcgtaagtcggagtttttttatacaccaaaaaaggcatcaccgttaagggatgccttctttgtatcaacttgctccaaaaactataattatttctttgatttcataatttttttggaacaacttcattatattataaataaagaaagatcgccatttttttctaagaaagtggtgaaaattgacagttgtatatgataagtgctattttgagttacaggagtgtagaaattgggagaaaaatatgcaaacaatcgataattctctctttcaagtctctgtcgatgagaatggggcccggatggcacatctggtgtctttaacagatcaatttgattatctcggcgagcaagaaagtgaagaaggtatggcacttgcttttccagtaatggatcaagccgataatttggctaacaagttgccttggaccgttgttgacaaaggtgatactcgcgtaagtctaactttaattgatacgccggagagctataagagttttccatatcattttgaagtaatgactacttatgctttggagggtaatcaagtcaatatatccttttatttgaaaaattcttcaaataaggaactgccattttctttgggctttatcttaccaacttcttggcaaagtgaaagccaggtcaataagattagtttgactggcaaagaacatggcattgatcttacttcaactgattttaagttgagtgcaaaagaaggaagcgttacagcttttacggataaaattgaattagaggcaaaaagtagccgtaattttgcgttaagcttgactttgaagtaaaaattagtaacgattttaataagatatactaagcaagtcagcgatgatttgctttttttgttataatacattcaatgtgaatttacatcataataggtatattttatgaaagatagaaaacaaagatctaatcacccgcataatagtcgggtagacacacacagttataaaaatcgtcatatttgggtctgggttattagtatcgtagccttgcttgcggttgctggagcggcgtactttgcctcagtttatttccgtactaagtcagcggttgataagacctatgatcctaagactgcagtgaaaactacaggtgaatttgatcgaaagaagaagttcgctgttttactgatggggactgatacaggtgcccttgatcgaactgaaaagcgcggccggactgataccatgattttagctgtagttaaccctgctaagaagcgttacacattggtctcaacaccgcgtgatacgatggcacagatggttggaagcgagagcttcaagacagaaaagattaacgcagcttatgaattaggcggggctaagatgtcaatggattcagtttctaagttaatcaatgtgccaatcaagtattatgccgtggttaacatgggtggaatcatgaagatgattcgctatgttggcggaattaatattagaccaacgcttagctttgaatatggcggttatatttttaaaaagggcaagctgacccatatgggtggtgcaggtgcgctagcatattctagaatgcgttatgatgatccgcgtggagattatggtcgtcaagaacgacaacggcaggtaattaccaccttgatcaagaaggcagtttcaattagttcattatcaaatctggattcaattttgacttctgtgtcaagcaatgttcggactaacttgccatttagtgcgatgcagcagattgcgatgaattatcgtagttgtgccaattcgtcatctagtgattatctacatggttacaatgcaatgatcgacgatgcggcttatcaagtacagccaactagtgaattgcaacggatttctaacctggtgcgcaaagaattagggttacctaaggaaacgatttcaaataatgaaactttccaaaacgaaaagaatattgcaaatggctttagctttaagagcgaaaaaacgcagcactatcatatctatgattacaccgaagaaggtgataattaatggcgcgcatttgggctactctgattggctacgtttttggaaatttcttaacggcgatgatcgttggcaaaatctttttaaaaataaatcctactgaatacggttcacataatccaggaacggctaacatgggtgctgtttttggtaaaaaatggggtattttaacctgtttaggcgatttgcttaaaagtttaattgccttgtttattgtatattttgcttttccagctcatattaatattgcttatacagggctaggcctgatcttaggacattgttttccaatctgggatcattttcgaggtggcaaaggagttgcggttgcagctcaggtagcagttttttataattggaaagctggctttgctactttattagtggctttggtattaacagcaattatgcaaaatttgacgattccgcctttagtgtttatgcttttattcagtataaatacattcttgcataatcaagaagcaggatttgtttttatcgtgattactttgatcatgtgctttaagttctggcatgatatcgtagactttttcaccggtcatggcaaaaaggttgatattctgctttcaattaaaaagaagctagggatcattaagtaatgacagaaatttttagtgaggacacagactagagaaaatgagtgagattaacaagaaaaaatcactaaatgctcttcaaatcatttgtttgattgtcgtagcattctttatgctagtgcagatgtattcttggggtagcacttttggtagattaccattaagtaccctaatgagatttattccaggactacttggtcacagtacgatggtactagtaccaatggtctttggtgctgtttatagcaaaagaaaggttcatccaactgaagcctttaagttttggattatagcggttgttacactagtgcttttatacttggtgaacttctttaaacgaccaggtacctttaatatgtggaagctctggggagtatttttcccagttttgactagtacatcagtattgttggctggcttgatttttagtatgctagttcaaccatacttgtatgaattacaacatcgcattactactaagcaaaatgtattattgcttagcgcattaactttgactggttttgcgactagtgcaggtacaatgatctttaacaagtcaatttatggcatttatttgatcttgtactttgcttgggggatgtttttagctaacgttaaaattcctaaaaaggtctttggctggtcaattgcagctggagtaatgtctttcttcgtaatgtttatcggtattcccggatttaatggggtttactggtaccaacgattatctggtcgaagtggcgtttattcctggaatcctaaatttttaagtaatattgcttcaccatttttgttcttaatggttttagcagccttcttaatctttagaaaagtgattgttagctatagtgctaagcagatgcacttctttattccagtaattatttttatggacgctccaattattggtggttttgttaaatcgttccgctttaccaatagcgctggatttaacaagttcttgatgattgtcatcatgatgctagctgcctggggcttaagctggctatatgagcgctatttattcaaggtgaagccggttaaacggacggttgcttttttcaagcaacataataacttagcagaaattgttgaagatgcttggactaacttcactgcttggatagttgaaaatcgagtacgactacttacatggggctggttctatgtattaagttttgcttcattcttaattgaatcagataatctgcggatccaaattacgactgcaactgatatcaatgccgtaattttcttgctcgggactagattcttcgctattattttgacagcaatcttccttgatgcaatgtttgcaattttctacttcattactacgcgttactggacttcaacagttttagtaactgtaattacaattggttgggctattgccaacaagattaaattagatcttcgtggggaaccaatttatccaactgaattagacgaaattgttaactggaagaccttgatgccaatggtcggccaacaaaagataattatgatcgctattgccttagtaattatcattgcattgactgtctttcttgcaattaagtttccaattaagaaaaagggctcatggaaacgccgtggtatttgggcattgttgagtttgcttttgttcatgacaccagtgcgctttaaccacgatggcggaattatttatcacattaaccgtggctttgataataagcaatcgtttagaaaccctgaacgtgatattcaaattaacggtccattattgaacttcttgaattactttgacctgcagattatgaataagccaactaactattcaaaatctacaattcaacatttgaatgagaagtacagcaagatcgctaatgaaattaacaaaacaagaaagaatactctaaagaatcaaactattgtttacaacttgagtgaaagttttgttgatccatatactttcccaactgtaaagatcgatcctaaggtgccaaatccagttaaatttattcaatcaatggctaagagatctacttacggtagcatgcttagtgcaggttatggtggtggtactgccaacatggaatgggaaactttgaccggtttcaacatgggaatgttcaagtcaaccttgacgccatatgttcaaattgtgccaaaccatgatttctatccaacggtcggaatggacttcaattataagtctgcagttcacccattcattggtacttactactcaagagtagaagactataagagatttaagtttaataagtttgtttaccttggctctaaatataagatcattgatcaaaagaaacttggtaaatcaacttataattctgattacactacttatgcaaatggtttgaaacaaatcaatagcatgaagggtggtcaattcattaatttgatttcaattcagaaccacatgccttacaacaattggtatccaaacaatgaatacatgggcaaggtatctggtgaactcttcaacactgctgctattcgtgaacaaatggcaacttacatgaagggtgttcaatacactgataaggctgtaaagcaatttatcggtaagattgataagatcaagaagccaatcacagttgtcttctatggggaccactacccaagtatcttgtcacaaaactacgctagtcgttatccagtgcaaatgcactcaactcgctacttcatttattctaacaagtatgctagagaacatggtgctaagagcaagttgactcacaactctaattacgtcaacactagtgactttactgcaatgatgcttgaacaaactaattctaaggtaactccttaccaagcattgttaacagaagttcacaagaagttgccagcaatcacgattaacttcaatggtgatcaaggcttccaattagttgaccaaaaggggcacttcgttgatccaaagaaattgacttcagaacaacaagcaattttgaaggattacgaaatggtgcaatatgatatgactgctggtcaagcttatggcttaaaagctaagggcttttacaagatcggtgactaaataaaagagatcgaacgtaaagttcggtcttttttctacgtaaagtcaagcgcaataaggtgtttggctttattttttacctaaattttgtcatgagtatcttttagtggcgatttatttttttagaaagcatactaaataagcccacctctatatttaatttatgggcttagcgttataatgtacttgatcaattaattacaactaaagtctttttggttatgtgtggctacgttgtaatcatatagttgatcattgataatcagagcataaatggttctgattagtttatgaattgaagcaatagctatctttttgaaccctttggtttgagaggatagctttttgctttcataataatctgctatatgacacggatttgtcttagctgcattatcaatttgtccaatagctcgataaagcaacttacgtgcgactgcattgccatgtttagtaatacttaaattagagtccatttctcctgactgatatctgcctggatcaattccgataaaagcattgattttattaggattactaaatctgcgtaaatctcctaactctgctaaaactctgacagcagtggtctgtgcaaagcctggaatgctttctaggttttctaaatcatgattaggcaaagacttcgctaacttaaccattcttgcgattaaattttctctttgatcacttaaattaagcaatctgtgtgcataatactgcacttgctcgacttctatgctagagcaagatacaactggataagcttgataagctaattcaattaatttatctgcagtccttagagcgtgtttaaaagcaatcccctttaagctcattaaccagttaataagctgttttttatcttctcttcttactaagtcacaatgaggatatcgcacaactatttgccagtaatttttacctttagcagaagaaaatagattttcaatttcagggaaagtcgattgtagagcttggtgaagtcgatttttagccattactaagtcagctgttaactggtcatagaagcggctcaaagcattaagctgcttataagtttgagattgaagttgattaattggatgatgatatagtctttgaattaaggccaaatgataagcatcagttttatcagtcttattatgacgtagtcccatatccatttcttttttagctttaagaggattaagaattacataatcatagccatagtcttccagaaaagattgcagtgtacgtgaataaacaccggtagcttcaaaaataatttgcggatgtttagaaaaagcggttaattcatgaagcaattgaataaaaccaggacgattattagtaatggttagttcatttttgctttcaccaattagttcacaaacagtagaagtagacttgcttacatcaattccaaaagtaacttgcataataaaaacctccaaaacttagtagtaaaacgtatttacttaagaaatcagatctaattttctaaactcgacatctagtgtccacattcttcgaagagactattgaaaacttaagtaaaactgccagtttattatgcgacatcaagtgtctaaagacctcagggcatatcgttttactactactttaattctacaaaagaataaaaatagtgaatcaattatcccgtcggataactaattcactatttagcttagaatgttttgtatccaatgataaaataagggctaagaggaataactgataattagctgatttaaaggtgattagaatgaaaaagataataacaatggcactagccagtgctgcactatttggatcttctgcaacaactgttcaagctgggacatataatcctaagaacattaccagttttaatattaataggcgtaactatgtagctaagggaaagatttataaactccatttacccgcagctggtagattagttactaatggcaatgttactttaaaaaatagtatggaatggacctgtattccttatggtaaggacaaaaatacgtattatctgcgtaaaggcacatattatttaactagttcaaagaatattagtgtgaagactacttatactcgtttaactaagatccgtaagaatttagaaacttacgttgaaacaaagaagaataatgacaacagtagtcttaaagctagaaagattgaaattggtcaagatattaaagcaatgggtgaaatgtacgattacgatagtgtcgactactacacatttactattgactcacctcaaatggttacgatgaggatgatcaataatccgatttatcagcttggaaaaggtaacattttcagcaagatgaatgtaatcatgttcagtgaaaataatccagttggcggtagtacgatgctttacccagagagtttcgaaattaatggcaataagattgctagtcaaagctggtacttgtctaaaggaaattatacttttagtgtaaatactcgtggactttataattttcaattaacggctgttcctgatacgcgtgtggtaccggcagatactgagatagaatctttacaaaacactaaggatggtatggttgctaacttaagggatgcacgtcatgcgaagacttatgaacttgcatggcgtgaaaaaggctcaaaggcagctccattcacttctagtagcaatactacagaagtaagtactgcacctgctacacgttacatagacaaaaatgatcgtaaaatcccagtttcaattggtaaaaaattagttaatggtcaaagctactattttgtagctcgcggtgtaagcaatcctgattacattcgttacggcaatccggaaaaagataattattttggtgcttggagtaattcagtagaacacacttactatgcaccttcagatgcaacaccaggtgcagttgatttaaccactgctaaagctgacagtacttatcacaacattcatgtggcttggaataaaattgctagtgcacaaagttatcgcattgcctaccgccaaaaaggtacaaataagtggtactatgaagtaactgatcaggctactaacgcgattactggtattactagaaatagaaattatgaagtgaaattgcaagcattgaatggtgaaaaaactggtccatggtccgcaattaaaacaatttttgtaaaatagcggttgactaaaactatttttctcgttaatatcataactaacaaatgagtagcgagtcggctcagcgttcagagaactagcggttggtgtgagctagacaggccgattttagcgaagtacttaatagggttgctcctttaccggcttgaataaggcgcagcagcgcaaacgtgggtggtaccacggctaataatgtaatttagtcgtcccttggtcttttgaccaggggacgttttttattggaggaaaaactatggcaaaatttgatattttggaagatttaaaatggcgtggtgccattaatcaagaaactgatgaggaaggtttgagaaagtacttagcagaacatgacgattgggcattgtactgtggtactgacccaactggtgattcccttcatattggacaccttattccattcatgatcttgaagagattccaaatggcgggctaccatccagtaattttaattggtggtgttactggtgcgattggtgacccatcaggccgtaagactgaacgtactttacaaactgcggaacaagttaagcacaatgaagaaagcttaactaatcaaatgaagaagttatttggtactgaaaattttgaaattagaaacaatgctgaatggctaagcaagcttaacttgatcgacttcttgcgtgattatggcaagttattccaagttaacaatatgattaacaaggatgttgtagctagccgtcttgaaaatggtatttcatttactgaatttacttatcaaattttgcaagcaattgatttctaccacttgaataaagatgatggtgttcaacttcaaattggtggtagtgatcaatggggtaacattactgctggtattgatttaatccataagcttgaaggcgcagatcgtccagcctttggtttaactattccattgatgcttaaggctgatggtactaagtttggtaaatctgctggtggtgctgtttggcttgatccagaaaagactagtccttatgaattttaccaattctggattaatcaagatgaccgtgatgtggttaaatacttgaagtacttcactttccttagccgtgaagaaatcgaagatttagctgaaaagactgagaaagaaccttggaaacgtgctgcacaaaagaagctggctgaagaagttaccaagtttgttcatggcgaagcaggtcttgaagaagctaaaatgattactgatgccttgttctcgggcaatatcaagaacttatcagttgctcaaattgaacaaggcttgaagaatgctccaagtgcggaagctggcaatgaaaagaagaatattgttgatttcttagttgacactaagattgaaccttctaaacgtcaagctcgtgaagatgtaaagaatggtgccatttatgttaatggcgatcgtgagcaaagtactgatttcgaagttgatccatcaagtgactttgatggtaagtacgttattattcgtaaaggaaagagaaagtatactttagttacaattaaataattaaatatatgattttaacattttatatataaaaatagagggattttttcctctatttttttagctaataatcggagatatttactaccaactaatatttgtaaaagataaagataatgatttgtgtaaaataatattttacttcttaaattgttattttattttctgaaatcaattgctacaatctatttattaagttattcacaaattcacattattactatacaatttgttatttcaagtgtaataccaatataaaatagctgcgtataccttttgcaaatgctgatgcaaagcactctattaaaaactgactcttaataaaaatatgtgaaaagcagcactatctgctttacttctaatcaaacagtgttatagtaatagtgtaaagagaaagtaagtaaatagaaagaggttattaaaatgttagaatctaagaaagctattaagattatttcaagtttggtaatcggtttgagtttaggctgtgttcttactcctattgctcaagctacttcatttactgctcctaaattgggtactgcaacacaagctccaaccaatcctgctattaaaaagggtgataagatctttgttgttattaaagacaccaaaaatcaaaaagtagctgtttacaataaaaatgctgaaaaaactagcaaaaaagttgcaatgggttctacttataccgcaaaagacgttaagaaggttaataaaaagaagattgttagaatcaacaagagtcaatggttgaatactaaagacgtcgttaagaactaaataaaagcaaatttaataaccgttttgaatacttattttctaaaaatacttggagagaataaataaggacgaggatgttcaaatgaatgtcttcgccttttttggtataatgaagacgccgctttagctcaataggtagagcaccgccgtggtaaggaggaggtccccagttcaaacctgggaagcggcttagttgttgtttttggcaagaaaggaaaaattttatgaagcatgaacttacaatgaatgaaattgctaaatttcaaaaagaatatgagcaaaaaccacaaaatcgggttgcggaattggctgttgttaataatggtgtggctaaggctagtttggattcagaaaaggttaggaaattgaaccgcactttttcaattgaaatcccaactgataatgttactgatcaaaagcaatcgggtcgctgctggctatttgcggccttgaatacattgcgtcatggttttgctaagaagtataatgctaaaaactttactttttcacaaaattatttattcttctgggatcgaattgaacgagcaaatattttctttgataatattttgaataccgcagatcgtccacttagtgacagaacagtgcatacttatatgcagggacctgatactgatggtggccaatgggctatggctgtttctttgattaggaagtacggcttagtgccaacctatgctcaagatgaaagtttcactgccaacaatactgctttcttcaatcgtattttgaataataagttgcgagaagatggacttgtgttgcgtaagttagctcaagcaggtaaaaatgatgaaattgaagctaaacgtcaagaatttttgagtgaggtttaccgtatggcagtaattgctttcggtcaaccagtacaaaaatttgaccttgagtttaaggatgatgaaggtaagtatcattttgatggtgatcttactccacttgatttctttcacgactactttactgatgacttggatgactatattgttttgttcaatgcaccagatcatgaatttgataagctgtatgctttgccatttgaagacaatgtagagggcggaagtccagttcatttcttaaacactaaaattgaaaatcttaaagaagctgcgattaagcaacttgaagcaggcgaaactttttggtttggttgtgatgtaggtaaagatagcgatcgtcaaaagggaattttagctcataacctctatcaaactgatgctatttttaatattgaaactaagttaagcaaaaaagagagactggaaactggtgcttcgggttcaactcatgccatgacgatggttggtgtggatgttgttaatggaaagccacgtcaatggaaaattgaaaactcatggggaaacaaggtcggtgaaaaaggctactttgtgatggatgataactggtttgatgaatatctcttcaaagtagttgttaaaaaacaatatgtaccggaaaaactggttaagatttgggaaggcaaagcaacgccggtaaaagcatgggactcaatggcataatggaaattaaacaagttatcgattttactcaaacacacttaaagaatgaaaaaacgggtcatgatttttatcatggcgaacgtgtagctaatttggctagtcaaatgtatttagcagatcatgctgatgctcatgaagatagccgggtagttgctattattaaaacagcgggttatttgcatgacacgattgatgaaaaaatatgtgctgacccacaaaaggtaattgatgaaattaaagttttattgccgcaagtagggtttaatgaactggaggcatgggatattttattcaccattcaacacatgtcattttcagctaatattgagcatcactatcatttgcctttatctggacaatatgtgcaagatgctgatcgtctagaaagtttgggtgcgattggaattgcccgtgcctttacgtatggtggtaaacatggcaataagatttacgatccagagattaagccagccgttttaactagtcatgatcaatatcgtaaccatgtcgaaaccacaatcaaccacttttatgagaaactttttcatttagaagatttaatgaatactcctgctgccaaaaaagaagcggaaagacgaactgcatacatgcgcgactttgtacgtgaatttatgcaagaatggaatgtttagaataatttaattttgaataagccttgatacatcagcattgaggcttattttttaaataaattaaaaataatattaaaaaaaacttgcaaagcaaaaaatatttagctatacttataaacaacttaaagagttctattaattttctcataaacgaggggagcaataatatgaagtttaccaagttattcgctgcaggagcaaccgttttgattgctggctcaacattagcagcatgtggtagtaattctaattcgtcaagttcatcagctaagaaaacaattaattggatggattcggctgaaattccaacgatggacatttctaaggcaacagacgttaccagttttaaccaattgggtaacgttgaagaaggtttataccgtttaggtaagaattctaaagttgagaatgctttggcaacagataccaaggtgtcaaaagatggtaagacctggactttcaccttgcgtgattctaagtggtctaatggtgataagttaacggctaaagactttgtttactcatggcgcagaaccgttaatccaaagacggcttcacaatatgcttacctcttcgaaggaattcataatgccactcagatttctgcaggtaaggcaccagttaatagtttgggagtaaaggctgaaggtgataataagttagttgttaccttagacaaacgaattccatactttaaattattgatgggattcccattgttcttcccacaaaaccaaaaggtggttgaagctaatggctctaagtatggtacttcatctaagactacagccttcaacggaccttttgtacaaaagggctggactggttctaacctttcttggaagcttgtgaaaaacaagaattactgggacaagaagaatgttaagcttgatgctattaattacagcgtgcaaaagacaccatcaacagcttacaacttgtaccaatcaaataagcttgatgctactattttagattcacaacaaactaagaacttaaaacatcaaaagggttacactttgcgtgatactgcagcaaccttctatttgcaatttaaccaaaagaagaagattttcaaaaatgccgacttgcgtagagcaatctcaatgtcaatcaatagaaaggcactgggaagtgctttaggtggcgctaataccccagcaaccagtttaacttcaaagggtgtagttaaccatgatggtaaggactggtcagaagttgttggtgataagaagaacgccgcatataacccaactgaagctaagaaactttacaagaaggctttgaaggaattaggcgttaagaacgtttcatttacaatcctgtctgatgatactgattcaggtcaaaagacgactgaaacacttcaaagtcaattagaagaaaacttgaagggcatgaaggtttcagtagctaacgtaccattcaagactcgtttgaaccgttcaactagtggtaacttcgatgttgttgtttcaggttggtcagctgactttgccgatccaatttcattcgttgacttgtttactagcaagaatgcacaaaataacggtaagtggagtaactcccaatacgacaagttgatcgctgattctaagactacagcagatacaactaagcgttgggatgaccttgaaaaagcagaaaagatcttgcttagcgatgaaggaatcgccccactttactacaagactgaagcttggttagttcgtccagacattaagggcattgtctacaatggcgctggcttaaactacaacttcaagaatacttatgtagcaaattaattaaaaaatcaggaggacatagtaatgattattatttcagcaattattattttacaaacaagacataaaaataatctctcttcacttgtaattgcgtaataatagtctagctatgatttgatgaatagatagaaggagcaaccatgtgaaggttgctcctttttgtaataaaaaagaatgagggtcaaaatgaaaaagtggaaaaagtattttagtgcaagtttattaaccgtcgtatcagctgcaactttggcagcctgttcaaataaaagttcgtcatctggtaccaagcaaaccttgaattggatgactaaatcagaattacaaactttagatttgtccaaggtgactgatgcaactagtttagatcaaattaataattcgatggaaggactctatcgtttaggtaaaaattccaaggtggaaaatgctttggcaactaagactgaggtatcaaaggatggtaaagtgtggcattttactttgagaaagaatgccaaatggtctaatggtgatccagttactgctaaagatttcgtctattcatggcgtaggactgttgatccaaagactgcctcacaatatgcttatcttttctcaggagtaaagaatgcggatgatgtagtagcaggaaagaagaaggttgaaacactcggtgttaaagcagatgataaccaacatttaaccgttactttggatagaagaattccatactttaagctattgatgggcttcggggttttcttccctcaaaatgaacatgccgttgaaaagtatggcaaaaattatggtacctcatctaaaacaatggtttataacggaccatttgtatcaaaaggctggaccggttcaaacttgtcttggaagctagttaaaaataaagattactgggacaaaggcaaggtaaaactaagtaagattaattacagcgtgcaaaagacaccatcaactgactataacttgtatcaatctggaaaattagatgtagcattattggcaccacaagctacaaaacaattgaagaaccagagtggttatacaattagaccagcttcttcaacacaatatttacaattaaacgaaaagaacaagcttttccaaaatactgacttccgccgagcattatcgttatcggttaatcgtaaggcattagcttcagctgtaggtggtgctaacaagccagtcactaccttttcaccaaatagtatgactgaagtaaatggcaaagattatactgaattagtcaaaactgctgaaactgataagttaatgacatataaccctactttagctaaaagttattggaagaaagcacaaaaggctttaggacagagcaaagttaacttcactttgctaacctatgacgatgatgatgccaaaaaagcaggtgaatacttgcaaagtactattgagtcaaacttgaaaggcgttaatgtcagagtaaatagtttacctaaaaagactgccttagttcgtggtcaaaatggtaactttgatgctttactgatgggttggcaagctgactttactgatccaatctcattccttgacttgaacacctcaaatgcttcatacaactggggcaagtgggctaataaggaatatgataagtatgtagcagcttctaaaactactggaaacgaaaatactcgttttgaagacttagctaaggctgaacgtgtattgttaactgagcaaggtgtagtaccactttaccagccagcagaagcttggatggttcgtccaactgtcaagggcgttgtatataatggtgctggagctaactataacttcaaatatgcttatgttgaaaagtagactaaaatcctaaatatctaaataatagaacttataacaataaacaactcctctatgtaattaaaaagcagaccgaaaaaatccaatgtcattaagttaagacattgacaattaagggtgcttttttagagatcgaatcatttggattcgatctctttttttgtataaaataaaggcgaaaagaccagccttttcgcctatcttatatattatatattttaaaccttcaaaattattgccagaaagatggtgttaattatgaaagcccttcataagaatattctagaacgtcttgatcaaattatcaataatactggggatcatattcacgattttattaataatcctcatgcttttaccaggaaacgcactttagatgcagcgacagtccttaaaactacaattaacatgcaaggtcagaatttaaacagtgaactctttagagcttttggcgaagatgcaactaaaaagaacgataaagtagttagtacttctgcctatgttcaacgcaaaagccagctttctcctgcttgttttaaacatattctgactgtttttaatcaaaatctatttaatattcaactttttgatcatcactaccgtttgtttgccattgatggctctgactttaatcaaatctggaatccgaaatcgaataacattgtacaagcttcttctcataaaaagaaaccctattgtcaaattcacgttaatgccttatatgatctattgaataatacctaccaggattgtatttttcagcctaaatcagaaatggatgaacgcaaagcggctgttcaaatgcttaaagctttgaattgtggtccatatattgtaacaatggatcgtggctacactagtttcaatatgattgaaaactgcaatcgcctgcctaactgtcattacataatacgaactaaggctggacaaggcggagttaaagaaataacgacattgcctgatcaagaatgtgatcgtgagatttcctgcctggtaactacttctaactattactacatcacgcataaagccagtgagaatattcaccatgtccagcatcattatcgccaatatattaagtatcgctctaaaaatacccaggatctaagctgggattttggcgagttatgcacaataaaatttcgagcctgcaaatttagaattaatgatgccaaatcaggcaaagaagaatgggaagttgtgctaaccaatcttgatcgaaaaaattatccgctaaaaagaattaaagagctttatcatctgcgttggggtattgagacctccttcaagaaattgaagtattctttaggcagtgtacagttccattccaaacaagataaatttattgaaatggaaatttatgcccatatgattatgtttaatgcaatcagtcaaattgatgcacaggcctatattccgcaaaagcattgcaagtatcaatatgccatcaatttcaagcaatcatgcttgattattcagagcatgtatttggcttcttctttaacgcaagattttgaacggatccttattcagatcagctattataccattccaattagaccaggccgcaaggacaagagaaatattaagcccaaatcagctgtatattatttatatcgcgtagcttaaaaaagcagaatctgtgctatgccttatttgttgtacgaaaaaagcaccaatttaaccaattaaatgttaaatcagtgctttaaaagtctaatattaattgtcaatgtcttaacttaatgacattggaaaaaatcggtctgctttttgattttcgcttgaaaaaagcaagttaggctagtaaagtaaaactaataattttttgaatgagaaaaggagagcttaaatgtcaaattgggatacaaaattcgctaaaaaaggtttaacgtttgatgatgttttattaattccagcagaaagtcatgttttgccaaacgaagttgatttgagtacgactttggcggataacattaaattaaatattccattgatcagtgcagggatggatactgtaactgaaggtgcaatggcaattgcaatggctctccaaggtgggctaggcgttgtgcacaagaatatgtcaattcaagcgcaagctggtgaagtagccaacgtaaagagcgtagttgtgccaactagtgctgcaaaggccgcaactgatgatcaaaaccatctgctctgtgctgcagcagttggtgtaaccagtgatacttttgaaagagcagaagcattgcttgaagctggtgctgatgcgatcgttatcgatactgctcatggtcactcagctggggtattgcgcaagatcaaagaaatccgcgatcattttccagaagcaactttgattgctggtaatgttgcgactggggatgcaactagagcactgtttgatgctgatgttgatgtcgtcaaagttggtattggccctggatcaatttgtactactagagttgttgctggtgttggtgtgccacaaatcacggctatttatgatgctgctacagctgcacgtgaatatcacaagccaatcattgcagatggtggaattaaatattcaggtgatgttgttaaagctttagcagcgggtggcaatgctgtcatgcttggctcaatgctatcaggtactactgaagcacctggcgaaatttttgaagataatggcaagaagtataagcgctatcgcggaatggggtctgttggtgcgatggcccaagcacacggttcaagtgaccgttacttccaaggtggcgtaaacgaagctaataaacttgttccagaaggtgttgaagctcgagtagaatataagggcgatgtttctgatgtagtctttcaaattgatggtggtctccgttcaggtatgggatattgtggtgctgcaaatattccggaattaattgataaagctcaatttgttcaaatcactaatgcaggtttacgtgaatcacatccacatgatgttcaaatgaccaaagctgctccaaactatacaaaatagatataataaaagttaaaaataagagagaaagcaaaatttctctcttatttttttaattttttggacattttaactagatatatttatttcttttggtataattaaaacaacattaaaaagtaaatgaaagcataaaataaaatgagggagcaattaatatggctagatacctattaaaacgtatattttatatgatcctcactttgcttatcgtggctacggtaacttttttcttaatgaaattgatgccgggttcaccttatgctaatgaagcaaagatgacgctaactcagcggcaaattatggatcaacagtatggtttaaataaacctatctggcaacaatatttgatttatattgcggggatgcttcacggtgattttgggacatccttccaatatagtaaccaaccggtagcttcattaattggggcgcgtttgggtgcgtcagtacaattaggtttacaagcattaattttgggagttgtccttggtgtaatcgctggggcaattgctgctatgagacagggtacttgggttgactcaactgctactgtaatttctattttgggtaaatcagttcctaactttgttttagcagttttgcttcaatactacatcggtttaaagctaggttggttcccaattgctggttgggggcaattttctcaaacgattatgccaacgattgctttggcagttggaccatttgcggaaacagctcggtttatccgaaccagtatggttgataccttaagtagtgactatattgagttaggtaaggccaagggcttaagtagaatggaagtcattagaaaacatgcaatgcgtaattcaatgattccattagtaactctgattggtccttatgctgtagccttgatgactggttcaatggttattgaaaatatctttaacgttcctgggattggtgaacaatttgttaagtcgattttgactaacgactatccaacaatcatgggaattacgatggtttactgtattggattagtagtaattctgttgattactgatattgtttatggattaattgatccaagaattagattagatgaaagcgaggcctagaagacaatatgactgaagaaaaattaaaccttcctgcagatgcctttgaacccttaccaaaagatgaagcacaggataacgaaaacattgcaggtccatctttatcgtttgcacaaaatgtttggcttcgcttcaagcagagaaaagcagctattatttctgcaattattgttattttgatgattgtagtagcttttggttcaaccccattcatcaataaatctactttagttaaatcgcacccacaatatgccaatttacctgctaaagtgccaggaatgagcgcaattaacgggttgaacggtaagattaagcaaaatggcaagtgggttgatgcttatgcccagaatggcgtgcctaaagataagtattttatcgcaggtacagattatttaggcagatctttgggacaaagaattatctatggtacaaagatttcattgatcgtcgctttagttgcagctttctttgatttaactatcggagtcgcgtacggaatagtgtccggctggaaaggcgggggagtcgataacgtaatgcagcgaattatcgaaattatctcttccgtgcctaatttaatcattgtagttttgatgttggtggtattaaaaccaggtattaagtcaattatcttggcaattgctatttcaagttggacgacaatggcacggcaagttagagcagaaactctgagtttgaaaaatgaagaatatgttttggcagctagatcattaggtgaatcaccttggaaaattgcttggaaacacttagtgccaaacctttcaagcatcatcattattcaaacgatgtatactattccaactgccatcttcttcgaagccttcttaagtttcatcggaatcggtatttcagccccagaaacttcactaggtgtacttttgaacgaaggacaaaagaattttcaattcttgccatatcagatgtggtatccagcaatcgtattgtgtgtgttgatgattgcctttaacttattaggtgatggtttgcgtgatgccttcgatccacggggacaaagatagaaaggattaacctaaatgccagaagaaagagttttagatgttaaaaatttaaaaattgatttccacacttatgctggtgaggttaaagctattcgtaacgtttcctttcacctaaataagggagagacgctcgcaattgtaggagaatcaggttcaggtaagtcggttactaccagaagtattatcggtctgttagcacgaaatgctcagattgaagacggtgagattgatttccacggcaaaaatttgctagagttatctgaaaaagaaatgcaaaaaattcgtggtaacgaaatttcgatgattttccaggatccaatgacttcgcttgacccaactatgaagattgggcagcaaattgcggagccattaatcaaacataagggtgcctctaagaaagaagcttgggctaaagccttggaaatgatgaaggccgtgggaatcccaaatgcagaagaacgaattaatcaatatcctcaccagttttcaggtgggatgagacaaagaatcgtaattgcgattgctttaatttgtgagccagagattttgctggctgatgaaccaactacagctctagacgtgactgtccaagctgaaatcttggacttgatgaaagacttgcaaaagcgggttaagacctcaattattttcattacgcacgacttgggcgtggtggccggtatggcagatagagtagctgtaatgtacgctggtgaattcttagaattcggtggtgttgatgaaattttttatgatccacagcatccatatacttggggcttaatcaattcaatgcctactttaaacagtgatactttggagtcgattccaggtacgcctcctaacttgcttgatccgcccaagggtgatccttttgcaccaagaaataagtatgccatgaagattgatgtggaaagaaagccaccatttttcaaggtaactgatactcactatgctgcaacctggcttttagcaccaggtgcacctaaagtggaaccaccagctgaaattacacgtcgctggaaaaaatataacttgatgaaacaagaagataaactgccagaggttaactagtcgcggtaaaggagatttttatgccagaaaaaaagaaaattttggaagtaaaacatctaaaacaatactttaaaaatggtcgtaatgtcaccaaggctgttgacgatgtaagctttaatatctatgaaggtgaaactttcggcttggtaggtgaatctggttctggtaagacaactactgggcgctcaattttgcaattgtataagccaactagtggcgaagtgatttttgaaggcaaaaatgtagcagatttaaaaagtcgtgcagacaaactagcttttacacgggatgcacaaatgatctttcaagatccttatgcttcacttaatcctagaatgactgttgaggacattattgctgaaggattagatattcaccatttggttaaaaataaagatgaacgaactgagagagtagaggaattattggaaactgttggcttaaatgcaagtcatgctagccgttttccacatgaattctcaggtggtcagcgtcaaagaatcgggattgctcgcgccttagccgtagagcccaaatttattgttgcagacgaacctatttcagctctagacgtatcaattcaagctcaagtagttaacttgatgattgaattacagaaaaagcgtggtttaacttacttgttcattgcccacgatttatcaatggttaagtttatttctgaccgaattggtgtaatgcactacggtaaactactggaagtaggtccagccgatgacgtctatgatcgaccacttcatgattacacgaagagtttgatttctgcagtgccaattcctgatccagaagttgagcggagccggacaaggattccttatgacgctcaaaaagaagaaatggacggaaagcaacgctcaatgcatgaaattcgtccaggacacttcgtacgctgctctgacgatgaagtcaagcattacgaagaagtagcggcaagctacgaaaattagataccaaatctaatgcaactctctctatattaatattatatttatgctaaaaaggcgatccgatatggatcgcctttttatatgatcattgctcgttaagctaatgaatcccatgctggtaggtcagtgattggaccttcagcgagcttcttttggttttcagttaagtacttcttgtggactacaacttcgtaaacatagtccttaaaccattcattattcatgacgtagaagcctttaacaccagatttatcgccccatgagttctcaactttccattgatgaacttcgccgttgtcttcatcaacaccaactaaagtcatggcatgtgacacttgaccgacgccggtctttaatctgtctgctttagacattttaaggtcaacgccgaataagtcatctaacttgtacaaattagtgtcaaggtaaccagttttacggtccatttgacgtaaaacatcgttaccaaaccaaacagcttcgccgtcttttaattgagcgatagcagcgctggacaagtattccattggtacattcaaaagcttgattctcagtgagccttcaatgttgtcttcagctggtagaccataaagcttgttatagtcatggtctggagcattggttaaaacaacatagtcatcaaaatcaacgtcgcccatgtacttgtgtaaaaactcaagtggagttaggttcttttctaaatgatatttcttgtcgtcatcacgatattcaagatcgaaagtcttaggtggttcacctactgcgatagcagtcatttggtaaacttcgcttaaaaatttttcgcgaacctttttaatttcatcatctttgccgtattgcttcaagtggcgcaatactaaagcatccttctttaacttatcgcccaaagcagtagcaaaaccagttgtatcattggtgttaaaagtttctggcattgcatatgaaggaacaacaccatatttttcaactaaagcggcagccatttggaattgtccaccatcactaccagcaaagtctaagtcagccttaacttgacgtgaatcaagtggcatgtcagcactgtctaagattctgttgtagaacatgttagcacgttcgatcttatcccagaagaagttgtaagcttgtgagaaggtgaagtccttagccttatatttcttaccaaaagcgtggcgcaaaacgttcaaagtcgcaaacagccagcaacgaccagaatgtttttggttagtgacattatttgtatcaagttcagttgaaaagacgcgggttaattgtccttgaacacgatcattataagatgcttcaagtacaccactgcgttgagctgcacgagcaacgactttattttcaggttttttattaaattcggcagagaacttttctagttcctgcacagttaattcatgagccataaaaaatctccttttcattttataatttttttctcaatttaattctattttaaagcaaaacaaaagcgggttcaatcagaactcgcttgagagaattattaatccgtcaacttattagatttcttgcctatatctaataaattaatcaatttggatagaattgccatcattgccagcagtttcctttggcaaagtgatggtcaatacaccattatcatactttgcatgaatctcacttgcaactacatttggtaatctatagcttctagaaatactgccctcacttctttccttatgaatgatatttctatttttatcgctagtgtccttaaatgattttcttgtgccgctgacatttaacgtaccgtcattatagttaacgttgatatcctgcttatccatgccaggcatgtcaatcttaactagatagtccttatcagtttctgcaacatcagattgcataatgttttcaatttcattatcgtcaaagaagtttcttggaaaaccaaaccaatcattcattgcatccatcatgtcgttgcgccgattcatcatattgtttgccataaataaaacttcctttcatttttgtatttgcttaattagaatataaggaaaagatcaactcatttcttgatctcttttctccttacactgtttattgtagtcgctttttatagaaatgacacaaattagcactcaaaaatttatagtgctaattttagactgataacgctgctacaataacattctgagattgtagataattattacgtatagaaaaataaagaaagtttgtgaaatagaaatggtatatttttagaaaatgacaccagaaggctatcaacaaattgaggatgaaattgctcgattaaaaaaagatcggccacgtagaattaaaattttgcaggctgcacgagctttaggtgatctttcggaaaatactgaatatactgaagcaaaacgtgatctaggtcacttacaaagtcgtctgcgttacctaggcaaacaattaaagtatctaagtgtataattttttacggtaagttgaataaataattaaaaaagcccaagtcctttgaatttggacttgagctcaaacaaaaagaccagtagtctgatgttaagaacaaaaaacacattagaagctggtcttttatgaattcaattgtaactgaaatcgcaaatattataaagtctgaagataattatattaagcgtgaaagaaaaataatctgtttcttcttaaacctgattaaggaaatcatggccttggctttagctaaagttgatgatgaaatgattaccaaggttaaagcacagggctatcagattgataagaagaatgagcgctcaatcaatatggcttttggcgaagttaggtatgtcagaagaagatatgtctgcccaggcaaacaagcaaggtatcccttggatgaattaatgggctttgacaaatacaagcgctacagtattttagcagtcaaaaacatcttagaagtaagcagcgttgccacttatcgcaatactgctctagcagtcaattgcctgtctggctttaatattagccatatgcaggtgggcaatttggtaaaaatggccgggaaaaatattaaagcgggccaagaagcagattcaagatatgatgccgcaggcactaagaaaaaggtcccagttttgtatcttgaaggcgatggcgtggtgatcaaaggcactaaaagccggttggaatttcatcgctatcaggtctgtgaaggcattgtcaatataagcaagaaacgcagaaagcgaatcaatgccaaggaatttgtttctttaagccgacttgatgcgctgaacgaagccaaggagtacctggccaatacttatgatctttctgatactgtaattcttagcaacgccgatggcggtgctggatatgccaaaacagacttcgatgacattgtagggctatgcaagcgtcatgagcatttcttggatgtctttcacctaaataagaaaatcaaagaaaggctatattttgcgcctgacctgcaaggcaagctgatttctgctttggaatacaaatacagctatgacaaagttaaaactatcctaaccactgcagaaagccgactaattgatgaattgaataccgagctcaatcatgattatctggggcgcctaaggaattatattgatcgtcattgggacgatattaagccgtttaagaaacgaaaactgactgtgactaaagccattggctgctgcgagagcaaccaccgcaagtatacctaccgtgttaaggggcaaggcaagaaatggtcaaaatctggagcagaaggcatgcttaggatcttaagctgcatcaagaatcgagagctggaattttggcttagcagcgagtttgaagattcagaaataactgtattgactgaacaggaattaaaagcagcggcccgtgacagcttaaagaagcgtcatgaagttcatttaggcatccagcatggcgcattaaccgcacaggtagctggcaatagttatttaagcaagctaagcagaaatttaagtcatataaatatttaagaaattaaggttagactaatggtttaaaggctaccgcaaaaacattgacacttactaaataagttgagaactataataaactgtctttttctggtataatatgggttttgtaggatacaattcagagtaggagtgaagaatttgaatacgccacaatcaagagagggtaatgtgatccgctatgccgtttatttagctggctatgtcgctgtgtttgcagtagtaaagctagttactagaaaatctccggttcatatttgggatttgattttattcggcttagttgcagccatgattctgttgttttatgtttatcgtttcaatcgagagcaacgcttttttgcccgtgattttaaacttccatggttgggcagtttgtcaactgttgttctattaacattagtgattacagttacacagatttcgatttcatacttacaatcatatggcaggattagtcattatgatttccaattgatatatgccaaaagtgaatcagttaacatgttttggtttttaatcgttgtccaaggaattgtattaccaatcctacaagaatttttggcgactggctttttgttcaattatgcttttcggcgaaatactaagcaagttgcaattatggggatcattgtttcaggtctgatttatagcttactgagctttcaaaattcagtagtactgtttattattgatgcaatttatggcatggtgtttgcttggagctatatgtacacacaaacattattgatgccaatttacttagctgtagttagtggcgtacttacagtgattatgatttaaaaacaaaaggatgagaaaaattctcatccttatttttgtataaaaaaagcggatagcgtgaatcgaacccgcatctacagcttgggaagctgtcgttctaccatttaactatacccgcaatatgtttttattttagcattttttctatttgaagatcaacacttttacgatcaattaagctggtaaaattttgaaaaagccagcggcgtagttcgttgggcataacaactagaggcattctattatggattggcgccatatctttgttaggcgcggtagtaaccattgaaaaataatcctgatcataaatacctgcaattaaggtaagtggttgattagtgcggaaggcgtagctatcatggtatttacgaccgttttcagcaatatgggtagttttagcatattcaaagaatttttcggttaagattaagcaacgttgcttggcaaaggatttgtcccacattgaaggcgctgaatcataaaatcgctcaattctagcgttaaataatggcttttttggatcaacgggacttggatagccccattttttgttgtttaattgcaattgaccattttgataaagcaaaacaggtgctacttggttaggaaaaatatcttgtgcttgaatgtcaaaatttggtgtaactaagggcaggtcaagatcgcttttgagatattgttgaatttgttttaaattaggtaaacgaaactggttgcacatacgcatttcctttctttagggctagtttaatcatagcctattttttgttaaaattaggtaattaaacaattaatattaataaaaaaataaacttaaaaattagaaaagagcaaaaagatggcgaaagaaattttattaactggtgaccgtcctactggtaagctgcacattggtcactatatcggttcattaaagaatagagtaaaattacaaaattcaggtaaatatgatccatatattatgattgcggatacacaggctttgaccgacaatgctcgtaatccggaaaaaattcgcaatagtttgatccaagtagctttagattacttagctgttggtattgatccagctaaatcaactatttatgttcaatcacaaattcctgctctatttgaattgactgcttactacatggatttagtaactgtggctcggcttgaaagaaatccaactgttaagacagaaattaagcaaaaagatttcaaagactctattccaattggctttttaaactatccagtttctcaagctgctgatatcaccgcttttaaagcaaccgttattcctgttggagatgaccaggaaccaatgttggaacaaacacgtgaaatcgttaggacttttaaccgtgtttataattgtgatgttttggttgaacctaaaggttatttcccacctaaaggtcaaggacgtttgccaggacttgatggtaatgcgaagatgtcgaagtcacttggcaatgcgatttatcttgctgatgatgcaaagacagttcaaaagaaagttatgtcaatgtacacggatcctaaccatattcacgttgaagaccctggtaaggttgaaggtaacactgtctttacatatcttgatgtcttcgatccagataaggacaaggtggcagaacttaaggcagaataccaaaagggtggcttaggtgacgttaagattaagcgttacttaaacaaggtccttgaagcagagcttgcaccaattcgtgaacgtcgcgaaaagtttgctcaagatgaagatgcggtttatgaaatgcttctggaaggttcaaaaaaggctaataaagtggctaatgcaacacttgaacaagtccgtgacgcaattggtttgaactatttcaagaatagataaggctgaggtaaagttatgcacgatcgaattccttggaaacaatattttatgatgcaggcgctagtaattgcgcaacgctctacttgtaatcgcgcattagttggtagcgtcttagtaaaaaataatcggattattggcactggttataatggttccgtttcaggacaaccgcattgtgacgatgtgggtcatcaaatggttgatggtcactgcgttagaactattcattcagaaatgaatgcgatcattcagtgtgctaagtttggtgtttctacagaaaatactgagatttatgtgacacattttccttgctataattgctgcagatccttgttgcaggcaggcgtgaaaaaaattaactattattttgactatcgcgataatccattggcgatgcaactacttcatgatagcggggtgccttatgaacagattaagattaatcgcaaatacgtggaaagcttggcccataaacttgaagaagacgagaattaatttaatttggttaatgggactagtaactgtatttttaataacgacaggatttgtccagccaaatattgaagatcatgctcatattttagataaagaaactcgcactttgattacggaaaaaaataatcgctattttcagactaaagaacaaccgcaaattgtcgttataacggttaaaaggctgaataagttaacacctaagatgctagatcattctaagcgaacggtctttattgtggtaggacagaaaggtaaaaagcgtaatgtgcaaatttattcaactaaagatttgcatagtgccttcaccgaggtcgctcggggcaatatcttgcgtgctgaagtagataaattgcgtagtcaaaataatgcaacttttaacaagggaattcgcttcgtctttcgggcatgtgcgactagagttgatcaacaatatcaatatgcacttgataaatatgatttgacgcaagcagaacaaaataaagtcgcgcgtccacatagtgtagctttaccaatcgcactggcactggcatttttaattacgggaattacttatttcttgcgtagatttagtcatcgtgatccaatttctaagaaatagtcggcttgacttatttgcattttgtccttacactttttatagacataattagcgaaaaactgttaggtgagactcctacgtgaacacacgctatcgcccagaaacatccagagatgccaacgggttaaataggtgtcgtcgacttaaggcgagatccagatagctagcatgtgcttacgtcacgtagtgttaaaactgaacgacgagtatgacagagccttgtttggcaaaagtcacctgcagagttacaggtggcttttttgttttgcttgtcccaattaaagaagggagcaaataatgttaaaagcagctagcaagaagcgatcgaatatagacattcaaaggattcaacggattgcgcgtgagtcacgtagcgagacgctggcgcgtttacaggcgagtgctgaagggctttcgactaataaggctgaagaaaacagaagagaatatggcaaaaacgaaatcattactaatagcaattcctctaaatggcgcttattatgggaatcaatcgctacgccatttacgttggttttattagtattaactttattaaccctgtttactagctatattttggtgccacaaggagataatgacttaattactacgatagtgatgatcgtgatgttgattatctcggttctcgtcaattttatccaaaaaatcagaattgctaaggtaactgatcaattactcaatatggtatcagttacaacgaatatccggcgtgatggcaaaaatgtggaattgccaacagatgaagtagtggttggtgatgtaattaacttgtcggctggtgatatgattccagcggatatgaagttgttaactagcaaagatcttttttgctcatcaagctatttagatggggatcctgagccggcagaaaagatggctaatgtagtaattaagccgagtatggctaatgattatttgaactaccctaatattctatatgagggaacaactattgtttcaggctctggcaccgggattgtttttgcaattggcaatcacactgtttttggcaaagcagttcaggctatttcccgtaaaaaagtaaaaactaccctgtttgaccgggaaatgaagcaattagctaaaatattgattatcgcgacagcaattgtgattccgcttttgtttgtgattaatggcctgactaaggggaattgggggggaaagcttaattttcgctttgacagcggcagttggcttaacaccagaagtgttgccgattattgttaattccaatttaacacggggcgcacgggaaatatcccaaaatggtgctgtcgttaagcaaatgaatgctattcaaaatttgggctcaactgatgtgttctgtatcgataaaaccgggactttgacacaaaatcaagtggttttagagcgtcactatgatttagatatgcaagaaaccccacagattttgaagttttcatatttgaatgcatattatcaaactggggtaaaagatttaatcgataaggcggtaattgatgccgcgggcgatgaactagatgtaaacgaaattcagcgtgattacaataaaattgacgaaattccctttgactacactcgaaaaagaatgagcgtggtagtggtagataacgatgaacaccacgggcagcacttattagtaactaaaggtgccgctgaagggatgctggcaatttctaataaggttgaacttaatggaaaggttgaggatttaactactgcctggcgagaaaagatcttaaatcagattaatgaattaaacgatgacggtttacgggtacttttagtaggttataaattaaatcctgccccagtaggtgagttctctgctaaagatgaacatgatttaaccattattggctatttggcttatcttgatccgccaaaagaaacaactaaagaagcgctggaagatcttaaaaaagattatgttgatgtcaagatttttactggtgataacgaagcagttactcgtgctattgctttgcaggtgggattaaacgttgatactgtttatgacggcacccagatcgaagcggttagcccggaagagttgcgtgaaattgttgaaaaatgcgatatatttgtgcgaataaccccggaattaagagtaaaaattattaatgcactcaaagcaaacggtcatacagtcggttatatggggaatggcaataaagacgctttagcaatgaaggtagctgatgtgaccgtaacttcgaatacgtcagttgatattatcaaagagtcagccgatattatttttgagcaaaaagatttgcagctgttagaagaaatgattctaatgggccgaaaagtcttttcaaatacaatgaaatatattaagaccttcttggtaactaacgctggtagtgtaattgcgatggttgtttcatcgctgctcttgccatttttgcctcttttgccattgcaagttttaattttaaatttgctgtttagcataagttgtctggttattccctttgatagtgtttctaaaaactatgtcaaaaagccacaaaaatggtcgattaagagatggccgaagtttgtacttaattttggtccgattctagcaattattgattttatcgcaatgggcttgatgttttatgtgatttgtccatatttagtagggtctaattatcatcattgggtctttatgacactattttattcggggatttttgtggaatcgctttggacaagaattatggtgattcacactttgcgtgatgaacgttttccattctttaagcaacatgccacgccagtggtgttcttggtgaccattggtatggcaattattggtacaatgttgccttcatcaagtatcgcgccaagtttgggcctagctcaattgccgtttggttattggggcatagtcttcttgctagaagtaatctacattttactgacgactttggttaagcacttatatttaaaaaaagaaaaattctgatttgaattaaaaggaattgctggttttagcccaattcctttttttgcatgttaaaataaaatagatattttagacgattaaaggagtttgattaatcaatggctgataaagatactttttatattacaaccccaatttactatccatctggtcgcttaacgatcggtaatgcttatactactattgcagctgatacaatggctcgttacaagcgcagtcaaggctacgatactttctttttaactggtactgatgaacacggcttaaagattgaacaaaaagctgaagcacaaggaattaagccacaagagttcgtcgacaagatggcggcttcttacaagaaattatggaagagtctcaatatttcttacgataagtttattagaacaactgacaaagagcacgtagctgccgtacaaaagatttttgaaaaattattagcaaaaggtgacatctacctaggcgaatatactggctggtactcagttgaagatgaagaatactttactgaatcacagcttgctgaagtttacaaagatgatgatggtaatgtaatcggcggtaaggctccaagtggtcatgaagtacgtttggttaaggaaccatcctacttcttcaagatgagcaagtatgctgaccgtttggtggaatactacaaggaacatcctgaatttattttgcctcattcacgtgaaaaggaaatgcttaataacttcattaagccaggtttggaagatttatcagttacccggactactgttaactggggaattcctgttctaagtgatcctaaacacgtggtttacgtttggatcgatgcactttcaaactatattaccgctttgggctatggttcagacgatgattcattgtttaagaaatattggcctgcagacgttcacttggtaggtaaggaaattgttcgtttccacactatttattggccaattatgttaatggctcttgatttgccacttcctaagcacattatcggccatggttgggtattgatgaaaaatggcaagatgtctaagtcaaagggaaatgccgtttatccagaatcattgactagtcgttatggtgttgatccacttcgctattacttgatgcgtgctcttccatttggcgatgacggtatttttacaccagaagactttgttgaaagaattaattatgacttggccaacgatttgggtaacttacttaacagaaccgtgtcaatgattaatcaatatcaagctggtcatgttgatgcagttcccgttgctcaagctgaatttggcaaagacttgcaagatacagctgctagtgtcattaatgattatcgcgaaaatatggattcacttcacttttcaaaggcattagacaatatttggaagttggtttctcgtgctaacaagtatattgatgaaactactccatgggctttgaacaaagaaggtaaaaaggaagaacttagcaaggtcatgagcaatttggctgaaagcttgcgtttaattgctattatgattgaaccagtaatgaccgaaactgcaccaattatgttcaagcaacttggtttaaattgggacaatgaagacgctaagcatttggcctttggtgactttgattgggatgttaaagtaattgaaaaaccacaaccaattttcccaagacttaagatggacgaagaagttaagtacatcaaggatgaaatggctaaagctaagccaaagaagaccactagaagtgaacaaaagaagggtgacgaaatcaccattgacgattttgacaaggttaagatccaagtaggccaaattttgtcagttgaaccagttaaaggctcaagcaagttgctcatgttcaagctggactttggtaatggcaaggaaacccaaattttgagtggtatccgcaagttttatccagatgcaagtgagctattagacaaaaaggttttagctgttactaacttaaagccacgtaagatgctgggtcaccttagtgaagggatgctcttatcaagtgaaaagcatggcaaaattaagttagctcttgttggtgatgaacatgcagttggggctgaactcggctaatggagatcattgataatcatactcatttgaatgacgagccgtttcgcggcaaggaacaatattatttagaacgagcaaaagcacttgatgtaaccaaggttatttgtgcggggcaagatcctgactttaatcaaagagcggttgacttagcacaaaggtttgataatgtctatgcgatggtcggttactgtcccgatgtggctaaagactatgatcaacaggctgaagataaactaattgaacaattgaagcagcctaaggtagttgcaatgggcgaaatcgggctagattattattgggatgaatcgccgcgcgacgtacagcgtaatgtttttgcgcggcaaattgaagtagcacatgacttgaagatgccagttgatatccatactagggatgcatttggagattgttataacatcttgaaaaatagcaatctggaatatggtgctgttttgcatagttttaacggtggtgttgactggttaaataagtttttggatttgaatgtttacttttcatattcaggtgttgtttctttcactaaggctacggaagtacacgagagtgcaaaagctgcgccacttgaccgaattttagttgaaaccgacgcgccatatttaacgcctaagccatatcgtggtcatcaaaatgaaactggctacgtacgttatgtggcagaagcaattgctaagttgaaggatattccactagagaaagtggcggatgctacttataagaacacagtgagagtttatgggcttaaataaaaagaattttgatgcggtaatcgttgttgaggggaaagacgataccatccgtttaaaacaatttttcccaggaatcgagacaattgagactaatggatcagccgtttcagatgaagtattgaagcaaatccaaaaattaagtgagagtcggcaaattattgtctttactgatcctgactttaatggcgaaagaatccggcgcattgtaactaaagctgttcctgatgcaaagcaagcttttattacccgtaaggaaggcgaacctcataaaaaggggagtctaggtgtagaacatgcttcaaaagaagcacttgagcatgcactaagtgatttgcatgaggttgaaccgcaaaaaagtgatttaactccagcaatttatcggcaattaggtttagctggtggtagcggctcacgaaaattacgtgaacaagtaggcattaaattacgagttggctatggcaattccaagcagttttataatcgcttgcatacttttggcgtttcattagctgaattaaaggcagctgtcaaggaggtagaaaatgaaaaataatattccaattggctctccagttagaacacaagcaattgttaaccgttactttgtcaaagctaaaaagaacttagggcaaaatttcttagttgatcagactgctattttaggtattgttgaagctgctgggataaaaaaagatgatcaagtcattgaaattggaccaggtattggctctttgactgagcaactactgttggcaggtgctaaagtttttgcttatgaagttgatgatagcttacctacgattttacagaatgaactgcctaagaaaattgatgatcagcctttggctagtcgctttaagctgatcttgaaagatctattaaaagcggactttaaggtagatattagtgacttctttgattttactaagccaattaaagttgtagctaacttgccgtattacatcactacgccaatcatttttgccttagctgaatcagatttgcactttacttcattgaccttaatgatgcaaaaagaagtagcagaacgattagaagcccaaccaggcagcaaggaatacggtccgttgactatttccgttcagaccgaaatgaatgttaaacttgctttgcaggtgagtcataattcctttatgccgcgaccaaaagtagactcgagcgtagttgtcttaacgccactgaaggaaaagccagcaattgaaaatcgtaagcattttatttgggtagtgaaaatgtgtttttcacaaagaagaaagacactcaataataatttaaaagctttgttgcctgataaaactaagcgtgatgaattatttgcggaattaggggtaaatccaagaattcgccctgaagaattaacaattaaacaatttattaaaattgctagctttattcctgcaagatgatgtataatattgaatttattatatatttgtgataaaatgttgctaaaggagctgttgtttagtgccaacatcaattatcacaattaaacataagttggattctcacttaggtgatactttaacagtagtagctcaagcgggtcgtaagaaagttactaagagacggggaattctaagagagactttccctgcagtgtttgtggttgatttagaccaacatcaaaataattttaaacatgtttcttacagttataccgatttactaactaagaatattgcattagagtttgatgatgaagctgaagaggctgaagcttaaacacaatttttgaaattgtcactagcatttatttaaaatgttagtgcttttttttgccctttagagtatattaattaagtataaaccaaacattagaaaggagatttcatgaaacgttcagaaagattggtggacatgaccaaatatttaatggagcgtccccatactttaattgcactaccattctttgctaagcgttacggcgctgctaagtcatctatttcagaagatttagctattttgaagcacactcttgccagcaatcaagatggtattttggagactgtagccggtgcagctggtggcgtgcgctatattccatttttaggtaaaaaacacgcggaagcatatttgtcagatttatcaactaggattgaggatccaagtagaattttagccggtggttttgtgtatctgtcagatattttaggcaatacgcaagatttacgtaaaattggtgaattagtagctactcattatgcttatgaagaaatcgatgctgtcatgacagttgaaacaaaagggattgctttagccaaagcagttgctcgttttttagatgtaccatttgttacagctagaaagcgatcaaaggtaacagaaggtgctactatttctgttaactatatttcttcatcgttgtctcgagtatcgaagatggaattaccgactcgtgctcttaaaaaagaagctaaagttttaattgtcgatgattttatgaagggtggcggtaccctaaccggaatggaagaattagttaaggaattcgatggtactattgccggcgtttgtgtactctgtgaagccgattttgacaaagaaaagctgattaagaactatctttcattagtaaaaattagtgaaattgatactgcccaaaagctgattgtagcagaacctggtaacttcttaactgaaactgattttgaccgtttctaaaatggtatactagaatcaagttttgattattaagaggttaatattaatggaaaaatatgtagttgttcttgccgcaggtaagggcacacgaatgaagtcaaagttgtacaaggttttacacaaagtttgtggtaaaaccatggttgagcatgttgttgatgcagctcaaggcgttaatcctgcagaaatcgttacaatcgttggtacaggtgctggcgatgtagaaaaagtactggcagacaagtctaagtttgctttccaagaaaagcaattaggtactggtgacgccgtaatgactgcgcgtgaagaattgggtgacaaagatggtgctactttagtagttactggtgatacaccacttttcacaactgatacatttaatgaactattcaagtatcatgcagaaaaaggcaatgctgcaactgtattgaccgcggaagctccaaatccatttggctatggtcgaattattcgtgatgatcaaggcaatgttttacgaattgtagaacaaaaagatggtaaaccagaagaattaaaagtaaaagaaatcaatactggtgtattttgctttgacaataaaaaattatttgaagcattgaagcacgttaataatgacaatgctcaaggtgaatattacttaactgatgttttagaaatcttgcgcaatagtggtgaacgcgttggtgcttacaagatgcctgactttagtgaaagccttggcgttaatgaccgtattgcattagctcaagctactaagactatgcaaagaagaattaatgaacagcatatgcgtgatggtgtttcatttatcgaccctgatactgcttatattgatgcagatgttaagattggcaacgacactgtaattgaaggtaatgttgtgattaaaggaaacaccgaaattggtagtgattgctacattactagtggttcaagaatcgttgattctaagattggtaataatgtcactgttacttcttcaactgttgaagaagctgaaatggacgataatactgacatcggtcctaattcacaccttcgtcctaaggcaattattcgcaaaggtgcacatattggtaactttgtggaaattaagaaggctgagattggtgaaaatactaaagtaggtcacttgacttatgttggagacgctaccttaggtaaagacattaacattggctgtggtacgatcttctctaattacgatggtgtaaagaagttccatactaatgttggtgatcatgcctttattggtgctggctcaacattgattgctccaattaatgttgcagatcacgcctttattgcagctgataccactgttactaaggacgttaataaatatgacatggcaattggccgtggccgtcaagttaataagccagattattggcataagcttcctctttctcaagataaagaatgggattaagaataaggcactagtgtatcaagctagtgcttttttgttaagaattgctaaatacttattgcaaaataataattgagacctacaataaggtgtactaataataatttttacatgaggtaggtaatacaatgaaattaagtcataagttagttatggtttcagcagctgttttgatgggtgttagcccagtattaggtatggcagaaaatactgtatctgttcaagctgctactaagagtactaatggcgtacataatacttacggtaaaaacagcaaagtcaaagtaactaagactatgaagtttgtcgaccgtaatggtaagaaaacttctaagactgctcctaagggtggtagctacactatttggaacgtcaagaatatcgacggtcaagtttactacagtattcaaactgatttgaagtactggattcctgcaactgcaactgaaggtacagtaacttataagtcaggcaatactacttatactttaaagagtgatggcaagaaggtaacaacttctacttcaactaagaaggctgttaagaagactaattcaaataaaaacactaaaaaagtagttaaagaatcaactaagaaaactgccactaagactactaaaaaaagcaactcagaaaagactactaagaaaacttcatcaaagaagacgccagtggctaaggcagttaagataactactaagaataaggcttacgtttacgacaagaatggtaagcgtgtaaaaaactatttaggcactagttacattggtaaaaagatcactgttaaaggtttaggtactaagaccattaatggtgttaaatattatgctttgcaaccaaatcattattacattaaagcttcagatgtaactgttaagtaataattgataggaaaaagacactttttcgtttctaaattggcaaaaaaatattttagatctacaatatataaatgaactttaagtttagtaagaatgaggtatttatcgatgaaattaagtcataaattagttatggtctcagcagctgcattgatgagtgttgctccacttttgggtactgcagaaaacgtcaacactgttcaagctgctcctaagaagactacttcaaagaaggcagcaagcaacaagatcactttggtacgtgtgtacgataagaatggtaagcgtcttgataagtacatgggcagtgcaaaatacactactattgctaaaggcataactgttacttcaactggcactaagactatcaatggtgtaaagtactacgatcttggtggtggtgcttatatcaaggctgttaacgtagatggtaaagctgcgtcatcaacttcatcactgtcaaagggtactaaggctaagtttgtttctaactcatacatttatgacaagaacggtaaacgtatcagcaagtaccaaggcaaatctaagtttgttaagggtgattcagtcactacttacggtattcaaaccattaacggtaagaagtattaccaacttgacaagaagggtactgcttttgtacgaactgttaacattgatggtaaaaccacttcaaaccaagaatcatctgtttcaaatgatgcagaatcaactaaaaaatatgactactcattaaagaagaatgcttatatttatgataagaatggtaagcgcatcaacaagtaccaaggcaagtctaagcttttaaagggtgccgcaattgatgtttatggcattgaaaccattaagggtaaggattactaccaacttgacaagaaaggcactgcttttgttaaggcaagtaatgtaactagaaccgttaaggcaacttcaattaccatgaagaagaatgcttatatctacaatggtaacggtgacaccaagaagaagacagttaagaagggtaagactgttaaagctactgaagcaagatacattggtactaagctttactacaagattggtgataatcaattcgttaaggctgctaatgtaggtaaaatttcaggcccagaactagaaccagttaacgaaccagatggtgctgctactgttgatactggtgataatactgtagatccaaacgtaaccaaggtaactacgattaatgttgctccactttacaacattaagggacaaccagataacgttagagcatttggcgaaggtcaaagtcaacaagtttcagaattgagatatattgcaacttctgcaactgctaccccagaattattctataaattatcaagcggtagaggctatttaaagcagtcagacgttgctgtaagtggtaagattttaactcctgttaacactccagaacaagctagagcagacgttacagttgctacagcagctgataagactaagttgcttcaagacattaacgaagcaactagtgttaagaactcagaagcttacaagtttgcttcaagtgatgccaaggctgcatatgatagggcaattacaaatggtactgctgttaacaacgatgctacagctactattgctcaagttaacgaagcagatgctgcaattgttagcgctaaggctaaacttaacggtaagaaaatcactgtatcaagcattagtaatttgactccagcagaagtaacttcaattgtacaattggttgcaactgctaataatgtaccagaaagttcaattcaactttcaaatagtggtgctttgacaattgttactaatggttatactcaagttttaaaccttagtgattatgttactcaaacttcagcaacttcaactaactagaaatgcataaaataagacgtagtatctgaaaggacactacgtcttattttttaggatattttcgttgtactagaaagtacaaatatattctaacttttttagcgattaatagttagtgcttttttatggttgcggcaaaattcttgctataattaaggagaatgtggttctttttagagcaacttttgctaaaatagagctggttaaatatttttacggaggaaattatgtcctataaagacgatatgatgatcttcgcccttaactcaaatgtaccattagcacaaaagattgcggatcgtgtgggtgttccactttccaagtctagtgttgaacgtttcagtgatggcgaaattcaaattaatattgatgaaactgtgcgtggtaaagatgtctaccttgtacaatcaaccagtaagccagttaatgacaatttaatggaattgttgattatgattgacgctgtacgtcgtgcaagtgctcgtacaattaacattgttatgccttactacggttatgctcgtcaagatcgtaagactcgtgctcgtgaaccaattactgctaaattggttgcagacatgcttcaagctgcaggtgctgatcgcattctttcacttgacttacatgcaccacaaattcaaggtttctttgatattccagttgataacttaatgggtgctccacttttggcagactacttcttgcgtaacggcttagagaaagacgctgttgtagtttcaccagaccacggtggtgttactcgtgctagaaagcttgctgaattcttaggttgcccaattgccatcgttgataagcgtcgtcccaaggctaatgttgctgaagttatgaacattatcggtaacgttaagggtaagcgtgctatcatcattgatgacatgattgatactgctggtactattactttagctgctcaagccttaattgatgcaggtgctactgaagtttatgctagtgcaactcatgctgttctatctggtccagctattaagagattgaacgattcaccaatcaagaatttggttttgactgattcaatcaatcaaccagcagagaagaagcttgacaagatgcttttggtatcagttggtccattgatgggcgatgctattaagtgtatccaaaaccatgaagcacttagcccattgttcaacaccagatacgaagctgacaagaacaagtaagataaaatttgataataaaaaatggctagccgatgaggttagtcattttatttttttttgaaaaaatcatcaccatttataataaataagagtgtattaaaatacacatgagaaacatctataattgaaactgtcaaattttttgtgtaaatagatttttctcgtagattgattttttaattatttatttaatcaaagtaggattctaaggtgtcctgaacctgaccaaagcctttatgaattcgattgaaataacggtcattgtagctcattgcctgaataccaataaaagcatcaagcgactgttcagttggaaactctgccttaggcttagctttgcgcttgatcacattgttaaatgattcaatcatgttagtcgaataaattgaagctctgatctgcttgggatagttataaaagaccagcagatctggttctatgtctttcaagcttctgataacatggctgtaaaccttgccccatttggtatagaagtcatgcaggacagctgtggcttcttctttgtttgtctgttgatgcacctgtttgaattcgttcatgatcttttcacgatcgtcgacgcgtactttagcgcagatattgcgcatgacatgaaccaaacagcgttgaaaatgagctttaggataagtcctggccaaggctgttttcatgccaacaacaccatcagaaagaaagagttcaacttgcttcaagcctctggacttcatgttttgaagcatctctgtccagacttcaatgttctcgctaggtgcaatgcagtagtcaatgacctccttgtgcccattaggcttgatgccaatggcaatatagactgcttcacgctcaaatgtttctcggcgcaaaggaaggtatgtcgcatccaaatagacgcagaaaaacttgtcgcttagcttgcgtttgtggtaagcctcaacctttggaatcatctgcttggaaatatttgatacctgagctggactgtaatggctgccatacatcttttcaattagatcggctatttccctggtggtcacgcccttggagtaaagcttgataatcatgctttccaagatatccgagtgctgcttgtagtcaggcagcgtgtgctgatgaaattgaccgttgcgatcccgaggcacttgcacttcaattgggccaaattgcgtatcaactttgcggaaataagcaccatttctagagttgccagtattccagccatttctggcatagggatcatagcccagaaaggcagtcaattcagcttctagcaagttattaacagcctgttgtagttctttgcgcaataaatcatttattttgtctggattgaatagagcttgagcaaaatctttggtaaaatcattcatgaaggagttcttctttctgtatgtgtttttttgttcaaaccaatcatacgagaaaggaactcctttttctaatgtttaaagaaataaatttaaggaatcatccatccttacacaaactattttacagtctcctataattagagatagatgtttttcatttaaagaggacaaaattatgacacaatatttatcattcgatattggcgggactaacttgaaatatgcattaattgatcaagaagggcatattcttgaaaaagaccgggtaaagactaatactgaaaacctagatgcattcatgcagacgatgtatgaagtcgctgacaagtatcaaggaaagttcgctggcattgcagtctgtgctcctggtaagattgatactaagaataaaattatctattttggtggagccttgccattcttagatggcttgaatttagaagagactttaggtaaaaaatatgatgtaccagttggcgtagaaaatgatggtaaagcagctgctttgtcagagcaatggctaggcgaattgcatgacgtcaatactggtatcgcaattaccttaggcactgctgttggcggcggtgtcatagttgataatcgtattttacatggctggacttttcaagctggcgaattgagttggatgattacgaattcaagtattggtactaggaatatggctgcttatgctggctttagttgttctgcggttaatatgatcaaaaaagttaacctggctttggggaatatcgatcttgataacggcttgaccgcgtttgaggcaattaacaatggcgatttaagagcactagccgtttttaaacgctattgccgcaatgtagcaatcatgatcctcaatattcaggcagtaatcaatggctctaaagtaattattggtggcgggattagtgcacagccaattttgattgaagaaattaacaatcaatttgataaaattttgcagaataatccaatgttgaataatcaagtgattaagccggtgattgtggctgctaagcatggcaatgattctaacttatatggtgcactttatgcattactgttggaattaaatgacgaagaagttaggtaaatattgcaacacaaaaaggggatgcgtcgcatcccttttttacatgagctaaataataatttaatctttgccagaaacaatcttggcaatcgcaatgctggcaccagcaacgcaagctaccatggcggttttacaaccaatcttgactacgtcttttaccaaatccttattttcatgaatgaagtcaaaagacattttagtatagtccatgcaataaccatgaactgtgtccatcaagtctttaacttgagtatagccgctcttaggttctgcctttacttcatcttctggattaatttgagttcttacatctgtatttaaatcatttctgttcatcataaatacctcgattctaggatttaccttaattttacttcttttgctcacgttttggtcttctcaaatatcttaaggcaccattcttaatatatttttgaaattgctcataaagtggatcgaaaatttgcggctgatcttcatcgtgactgagcatagttttagggaagaagaagcgttcatctccttggaaagtaccatttaatgcgcgaaccaatgggctgagttgggataactcaatcatgctgccgtcgtcttgcataatttcaatttgactattagcatttttccccgttggcttataagcatcatatggttcatcgaatgcggaattggtagcggtatagtaatcaggattaaagccagcttgcttgattaggctcttgagcttaggtaaaagatttttggtttcttcatagattcggacactagctagcggttttctgtacaagtaacgcttggctaggtcagataagattggatcttgtgcctgggtccacatagaaaaattagtttccattactccatcatcaagctttaaataatcgtctaaagtccaattgccttcaaggaatttagtcaagctaggtgtaacttgcagatttccctttttataaacagtttgagcgcgctctaaaaggtgatgcaagatgacttccattgagcgtcctacgcggtggaagtagacctgttggtacatctgatagcgtgacacgatatagtcttcaacggcatgcatcccattgttggcaaaacaaataccattttgataaggacggattacccgtaaaattcttgataaatcgaacctaccatagttaactccggtgaaataagcatcccgctgcaaataatccatccggtcagcgtcagcttgacttgagatcattttaaccacttgcggattaggataagtcttagcgattacgctggcgactaattcaggaaagttaggtgcaacttgttttaatgcatggttaatttctgtattaggatcagtaatgatcttttgtccaattttttcatgattggtgccaaaaaggtgctcgaatgtgtgcgaatagggcccgtgaccgatgtcatgaagcaatccggcacattctaccagtaatcgattatcatcgttccagagaccgtctcctggcgtaattgagggatattttttgctaaagatatcgcaaattcttctcgttaattcataaacgcctaagttgtgctcaaatctagtgtgagttgcacctggaaaaacatagctaacaggacctaactgtttaatgcgacgcatgcgttgaaattctttagacttcagtatgtccaaaacaactttatcttcaatatgaatatagccgtgaaccggatcacggagaacaacctcttgttttaatttttcgctttgaaatcttgtcataaaaatccaccaagtttaatttattaattttttgaactatatataataaaatagattatatctaactaaaattatatcagagatatagtaataatgtttaaagggggcgcttgtttgacagcaattacgattgatttgactagtaaaattactcaagacgatgagacagagacttttacgcgacatgcgcaagggcaattgactgaagaaggcgacgtcacacgaatttcttatgccgaagaagggcaaattccagtgaagatgcttctaaaggagaatgaattgttgattcgccgcggcgttgacagcaataattattctttaatgaaatttattccgggtgaaaaaggcaactgccgctatgtagttgaagggcgccgcatggacatgaccagcgtgactaacttgcttgaatatcagagtcaagatgatggttcacgtaaacttcgggttgaatatgacctctttaatggactatacttaataggtaactatgcagtcacgttgatttttacttaaaggcctagtagaatagtaaagattgtataagagaggacgtacagctgtgggattagacaaatttaaagacaaaaatcgcgatgaattgtcaatgatcgaagttgctcgtgcaattttggaagacaatggcaagagaatggcatttgccgatattgttaatgccgtacaaaaatacttgaataagagtgacgaagaaattcgtgaacgtttaccacaattttatactaatatgaacactgatggtgaatttatctcaatgggtgaaaatgtttgggcacttcgttcatggttcccatatgaatcagttgatgaagaagttaatcaccctgaggatgaagaagacgattcacgtaagcaccacaagaaggttaatgccttcttagctagcgctactggtgatgatgacattatcgactacgataacgatgatccagaagatgacgacttagacgccacagacgatgatactgatgatgtattgccagatggcattgaaggtcaattgtcacaattaaatgatgatgatgatgatgacgaagaagataattaatttgcttgacttaagaagaaaaagcagataatatttttgttgggcaccctatgtgcgtttagctccccgttagtgggagcttttttgtttaaaggataagttaaaaggagcagaacatgacaaaatacatcttcgtaactggcggtgtcgtatcttcacttggtaaagggattactgcatcaagtttaggtcgacttcttaagaatcgtggcttgaaggtcactatgcaaaagtttgacccatatattaatattgacccaggtacaatgaatccataccaacacggtgaagtttatgttaccgacgatggtacagaagctgaccttgacttaggtcactatgaaagaatcgtagatgttagaactagcaagtattctaacgtaactactggtaagatttaccaagaagttttggaaaaagaacgtcgtggtgactaccatggtgctactgtacaagtaattcctcatattactgacatgatcaaaaagaagatcatgcgtgcagctttgactactgattcagatgtaattatttctgaaattggtggtactgttggtgatatcgaatcaactccattcatggaagctattcgtcaaatgcgccgtgaagttggtccagaaaatgtaatgtacattcactgtactttggttccacttcttcacgctgctcatgaaatgaagactaagccaacacaacactcagttgcggaattgcgtagtattggtattcaaccaaatatgctggtacttcgtgctgaacaaccaattgaccaagaacacaaagacaagatttctacttttacagacgtgcctgttgatcgaattattgaatcaattgatgctccttcattattcgatgtgcctttgaacttccaaaagcaaggcatggatcaaaaagtctgtgatttcttacacttagagagtccaaagccagaagctgacatggaagcttggaagaagcttgatgaacgtgctaagaccttgaagcatcacactaagattaccttggttggtaagtatgtagagcttgaagacgcttatatttcagttactgatgctttgcaacatgctggttatctttacaacactaagattgatgttgataaggtacaagctgaagacgtaactgaagataatattgcagaaatcatgaaggattcagatggtttgattgtccctggtggttttggtactcgtggtcttgaaggaatgattactgcaattaagtatgctcgtgaacatgacatcccattcttaggtatttgtttggggatgcagatggctagtgttgaatttgcacgcgatgtattaaaccttgaggatgctaattctgcagaagcagagccaaactgcaagaataatattatcgacattatggctgataagcgtgatgaagaaaatattggtggtactttgcggttaggtatttacccagctactcttaagaagggaactaagactcgtgcggcttacgatgatcaagatgttattcaagaacgtcaccgtcaccgttttgaattcaataatgaataccgtgaagcctttgaaaaggctggtatggtcttctcaggcgtttcaccagataaccgcttagttgaaattatcgaattaccaaagaaaaaattctttattgcagcacaatatcacccagaatttttgagtcgtccacaacgtccagaaggcttatttaagtcatttattggcgctgctagtggtcttccagcacaagaattttaaagtgattaaagtttgattatacaaaatcttaagaaaacaagaactgagagacctcagctcttgttttttttgtaaatatcctttaacattattatgattaattgaaagtagaaaaggatttgttttcgccaatgaagcagatgataattcatggtggaaagcccctgcagggtgatgtttggatcggtggagctaagaactcaacagttgctcttattccggcatcaattttatcaagaacaccagtgaccttggaaggcgtcccaagaatagctgatgtagttaacttgatggacttattgagtgagatggatgtacattgtgatttcggtgaaaccactttaagaatagatccaactgatatcaagatgagtccgttgccagctggtaagattaagagtttgcgcgcttcatattactttatgggtgcgctacttggtcgctttggcaaggcagtagtgggcttccctggtggtgacgatattgggccacgtccgattgaccaacatattaagggctttgaagccttaggcgctagcgtaaaaaatgaaaatgatcaaattataattactgcaccagaagatggtttgcatggagcaaaaatccatttaaagatgccatcagttggggcaacgatgaatattattatggctagtgtgacggcacagggccagactataatcgaaaatgccgcaaaagaaccggaaattattgatttagctaccttcttgaacaatatgggggcagttattcgtggtgctggtactgactctattcgaattgaaggggtggagcagcttaaagcacagattcctcatacgattattccagacagaattgaagcagggacttatgttgctttagctgcctgtattggtaatggcattcgcattcataatattatcgaagaacaccttgattcatacctggctaaagttgaagaaatgggtgtagtaatcgattcagatgaagattctttgtatgtttacccagcgggcgacctaaaaatggtccaggtgaagacagatgtttatcctggttttgcgacagatttacagcaaccaattacaccacttttattaactgctaaaagcggtgaaggtgtagtaatcgataatatttatcctaaacggattggtcatattgctcagttgcaaaagatgggagccaatattaaagttgaagataatattattttggcccatccaactaagcagtttcatggtgcggaagtaactgcaggtgagattcgagcaggtgcctgtctgatgattgcaggcctgatggctgatggtacaacaacgatcgacaaggctggtaatatcttgcgtggttatgatcgggtccaagaaaagctgcgtcaacttggagctgatgtaactatcaaggatgatcctgctgtaccgggtattttagataatatttagtaaataaaaaccacatggaaaatctccgtgtggtttttgtaatgatatgtcgatttgtaggtgaacaaatgagtttaatttttacaagacgtgcacaaaattcagatgtggataaaattgtgcaaattttaaatgatgcgacttcttttttaaaggaaagtggctcatcgcagtggcaaagtggctaccctaatcgagcaactgtagaagatgatattaaaaatgggtgtgcttgggtattaactgtggataatgaagttgcaggttatgcggcagtggtaattggccgtgagccaacttatgcggatattgaaggcaagtgggaaaataatgtggacacctatgcgacaattcaccgcattgcagtttctagtaagtttagaggaatgcatttgagtcaatttttcttgagcaatattatttctctaacttatgcacaaggaattcacaattttagaattgatacaagccggaaaaataaaattgtccagcacattgcagttagtcataattttattgaacgagggattattcaagtaactgaagatccggttgattcaagtagaatagcttacgagttgaatttaaggtaatgaaaaaccacatgggatgtgaattccatgtggattatttttttgctttatttattaatcaagcaagtcgtatttcaaagtcattaaaccatgaccttcgtcaaccatttgaccaagcagttcaacagtgttgttataaactgtatcagacatcttttgattagcagcaattaacttgtcttgtaattccttacctgaaaggttctttgcttctttgtcagtatcatgttggatcttgtgacattgtgctaaactcttttgttcaaaggcgtcttcaagttcaccgtaaacacggtagttggtatcgcctaattgagcagttaacttgttaagccagaaaatcttgctcaagttaaacttaggagtggtttgccaagcttcaggggtagtagtgatattagtatagaatggcaccattgagttaaaggtgttaggaccaaaggctaaccattgtacacctgcaatttctgcaggaacatcattacgaatttgcaaaatatgggtttcaaagtttctgttaataccgataggacggaaggtcttcttttgttcaggagtaccttgatcgccataagcatcgtaaggagtgtcttggtagtgtgagctttcggcccatttaatatcttcaattgagattaaacgattagcatggcagataaaaggttgatcttgatctgctggagtaccaccaaagtctggatcgaaatagttgtgaatataccaagcacgaggattattgtagtgagcatccttaatagttgaagaaccaaagatgtggcgcatgttgtagccttcacggtctggattcaagtgatattcttcgattaaatcctttaggtctgctgaacaagcaaaattatcagaatcgttgaagtcgaaagtatcaatattcaaacggtttggtgcaataacatatgcatcatctgggatacggcgtgcaatccaatgatgaccaccgatagtttcaaggtaccaaatgttatccttatcagaaaaggccataccgttcatttcataagtaccgtatttttcaactaaatagccgacacgtttaacaccgtcaaaagctgagtgcaagtatggtaaagtcaaagtgacgaaatcttcttcaccaagaccaccttcacttggatcaagtaatgggtcaacaccttggatgcgtgaattagtagtgatggtttcagtagcggtcatggctacattttcagcgttaattccagctgcgccccaaataccatttttgcctgaaacatcaggtgctgaagtatagcgtaatggtgtttctgctaaatcagcgtcgtcaatcttttgtttagaaattacactagtgtagtgcttaggttggtcagctgggttaacagctttaaagccttcagggatgatgacgcggccaccgtcttcactacgagcgatcatcgtagagccatcaatagttgcttttttaccaactaaaatagtagtacattctgtttgtttcattggatcagtcctttactttatatttatgtttaaattatttcctaataatattgtatgcaaaaataatccgataagccaaagaatataattaatttccccgaaaggcatttggactaacaccgctatagcgtttaaatgccttggagaaggtaaattcatcgccgtagccgacttttttggcaatttgctttagattgtgtgtggtattagttaattctttcttagcggcttccatgcgcaattgcatgaggtacttttgcggcgataatttagtgttttttctgaacaaagcatataaaaagctgcgtgatactcctagcctatgacagagttcgacaatattgcaggtaggatcggtataattttgcttgagatagttaatggcaatttgatactgatcatttttcgatgttttgcggactggtggatggttaggaaagtcttttactagatgataaaaaagttgataagttaaagctgaaatttttaaattgtttaataaggtctttttcttcgccaaacattgataaaggtcatctagggtttgataaaaggcagttttttgaatttgacgcaagaaatttttattaggtaaatttgatgccttgatgctttcattaacgccgttgccagctaggccaatccagaagtattcccagggttcattgtggtcagcttgaaaggaacaagtttgactgcgtggaacgtaaaaaagatcgccagcttttaatttaactgcgtggtgtctactagaagtaaaggtaccagttccgctaataatgtaataaaaaatatcgtttttacgaagattgtcaccttgaaagaattcatcgggctgacatttttgtcgaccataaaacatgatgtagctatcaagattttggttatttaagttaggcatagacttcctcactgttgaaaaattatgttacttctattatagaagagattttgcttaaaaggtgaagaatgaaaaacgaccacattaagcggtcgttcgtgaatatttatagaaaattatgatatgtggaattataaaatgaaaaggtattttacttattggcaccacttcttccattgaataaaagattgagcagagttgcacagatgctggctacgacgataccgttgcctaagaacaattgaatggtttgggggagagtttggaagatttgaggatagacagtaacgcccaatcccatcccgattgaaatggcgacaattaaaatgttgcgattattttcaaaatcaactttagttaacattttgattccttgaacggcaatcatggtaaacatgactaacatagcgccgcctaagactgaatcagggatgatagtaactagagcaccgattttaggaagtaagcccatggccattaataagccagcagcccaatagatagggcgcttggttttaataccggataattgaagtaagccgacattttgagaaaaagtagtgtaagggaaggtgttgaaaagcccaccgaagatttgtgctaatccttctgcacgataaccttttttgaggtcttcttcggtgatatcttgatgaagtaggtcgccaatggcaaagaagacgccagtggattcgaccaaggaaactaaggcaatgatgatcatggtcaaacaagatgaccattcgaattcaggaacgccgaagtagaaaaattgaggtaagtggaaccaagaggcttgtgttacgggtgtaagtgaaactaatcccatgcaaccagcaatgatagtcccagcaattaatccaattaaaacagatatggagcggagaaatcccttagcccagacttcaatgacaacgatgatgaggatggtgataaaggcagcaataagattttttgcatcaccaaagtccttggcttgggcatttccgccacccatgttttgaaaggccacgggaatcaaagttagtccaattactgtaattaaggtcccagtaactactggcgggaagagttttttgatttttgaaaaccatccggcaattaagaaaacaaagattccagcaacgataatggcaccatacatggtgttaattgaaaatttttgcccgatcatttctaagggagctaccgcttgaattgcacagcccaaaacgactggcaagccaatgccgaaatatttattacggaatagttgaattaaagtggctaaaccacacatgaagatatcaatcgaaactaggtaagtcatctgtgtgctattgaagtgtagtgccgtaccaattaaaaggggaacagcaactgcaccggagtacattgccagcaaatgctgcaaacctaggacagcagcttttttgtgactaacttctttttgtgccatttttaattattcttctccctcgaagtgtacttgatcattttcaaagctatcgatttttgctagggcttcaaaacgtagaccttctttttctacccattcgcttccgccttggaaggtttttgcaacaacagcaccaactccaacaatgtcgcagccggcttgtttagcaatgttaaccatgcctttgactgcttcaccgtgggcaacgaagtcatcgatgattaagatatgttcgcctgggtgcaaaaatttctcttcaacgcagatcttattgttgaccttcttggtgtaagaaaagacgtcagcccaataaactgcatcattcaaagtagacggctttttctttctggcaaagatcattggcacgtgcagttggtaggctgccatgacaccaggagcaatcccggacgcttcacaagttaagaccttatcgactttttcatctttaaaaaggcgggcaaattcttcaccaacatgcatcattagttgcggatcaacttggtgattcaaaaatgaattaattttaagcacatttccaggtaaaacttcaccatcttgtttaattcgatctactaattccttcaatattattctcctcaagaaagaaataaggacttcttctacctaaaacaggtaaaagaagtccttaagattattcttaactttcattcacctatagtccggtatttacggtaccgggtagagactgtcgaccttatttcgacgatatatagatatttgtgttggcttaatcttaacagaatatattgccgaacacaagtggaaaattaaggattaatgttcgattatagtaaaaattattcagctgcgatatcgttatggcacagactgatgatcttttcgataatgccatataagatccccgcgattggccagatgatccagctgcgttcccaatcattggtaatgaagctatatcctagataaagtaagactgctattaaccaatagagtgtggcgtatttgttcataatcttgcgacagccggttaattggattgttaaattgcccaggtcaagcataatagctagggcagtagaaaagcaaaggatggctggactgcgaataattaaactaatggctaaagcgcgaaggctggcacttttttgagcagctgttaagtagccttgctcttgttgatcagataaaattggcaattcttcagttaagttattatctttgtggtttaattcaaaagaaggtgagccgcttttgagtaaataatcggtggtcactccaaataattctgataaagctacaattttttcaatatcgggaattgattgttcactttcccatttggatacagcttgccgactgacattcatcttttcagctagtgcttcttgaaaaagatgatttttcttgtgtaatgccgcaattttttgacctaatctcatgattgatcgtcctttcgttttgaaataatttgatttaacgaaaatttgcggttgcagaccaccactttttaattgcatttagcgcaactagtagttgcaactgctggttgctcaagataaaagccgaacaatgaatggctatttttaactttttgattgacctttttaatttttcctagtagagttagttaaaaatgcgtaattgaaaagagggagtaaatagtggctaagaatctagacgattttgataaaattattgtgcttgacttcggtagtcaatataaccaattaattacccgccgtattcgtgacttcggcatctattctgaacttttaccacacgatctttccatggagaagattaaacagatcaatcctaagggaatcattttctcaggtggtcctaacagtgtttacgataatggtgcattaaaggttgatcctgcaatctttaagttggatattccaattttgggtatttgttacgggatgcaattaatgtctcatgacttaggcggtaaagttgaacaagctgaaaacaaggaatatggccgcgccaacattacggttgaagatccagacagtattttgttcaatggcttgccttcaaagcaatacgtttggatgagtcacggtgatttggtaactcaagctccaaagggcttcgaagtaactgcctcaagcaaaaactgtccaattgctgcaattgctaatccagataaaaagttttatggcattcaattccacgcagaagtgcgcaattcagaatacggtttagacatcttgaagcactttgcttttgaggtttgtggtgctgaggctaactggaccatgaacgacttcatcgacatgaaggttgatgatattcgtaaggaagttggcgacaagaaagttatcttaggtctttcgggtggtgtagattctagcgttactgctactcttttacacaaagcaatcggcgatcaattaactgcaatttttgttgatcacggaatgctgcgtaaagacgaaggcaatcaagtaatgcaagccttgaacaaggatcttggtgttaacatcattcgggttaatgcccaaaagagattcttagacaagttgaaaggtgtaactgatcctgaaaagaagcgtaagattatcggtaaggaattcatcgaggtctttaacgaagaagctaagaagttaaaggatgtagatttcttagctcaaggtacgctttatactgatgttatcgagtcaggtaccaacactgcccaaacgattaagtcccatcacaacgttggtggtcttcctaaggacatgcatttcaagctgattgaaccactgcgtaagttgttcaaggacgaagtacgtgaacttggtgaaaagctgggcattccacatgacttagtatggcgtcagccattcccaggccctggtcttggtatccgtgttcttggtgaagtgactgaagacaagcttaagattgtgcgtgattctgatgcgattttacgagaagaaatcaagaaggcaggtttacaagaaaagatctggcaatacttcactgttcttccaggtattcgctccgttggagtaatgggcgatggacgtacttatgactatacgattggtattcgtgccgtaacctcaattgatgggatgactgcagattttgcccaaattccatgggatgtacttggtcacatttcagatagaatcgtcaatgaagtagataacgttaaccgcgtagtttacgatgtgacgagtaagccaccttcaactattgagtgggaataatttcgtaccttaataagaagagaaaatcccaatatgacggcatttgaatagggtcaatattagtggaaagtaccggttgaaagcaagttgtctaccgtttttctaccggtagaagttgattttaatcagcatgaatagtgcattaaacgctactattacctgttcgttattttggggttgtctaccgaaaattgaatattttgcttacttttgttgaaaagtaagtgactgttgtcctacttattgtcatttgataagtggggcattttttttctctttgttgccacaaaagaaatgctgaaatccaaacggagcagtctgtttgatcgttgttgttacttatgacgaaaacataagtaaatcagatatgaaatctcgaaatgaccttgaatgaaatctcaaggtactcattctcgaatgcaatatctgatcggtcgcaaccgaaggctgaaaatttattttgccgggacggcaaacatgagggggtcattgcacgatgaagccgttaaaggatgagctaattcaaagtcgacttgatgaagatgaattagcagattttgataaagtgaagaaactgctcgatgtgaagagtaattctgttgcaattcggcagatgattaaagatgaaatgagaaagccagaaatgaatggaagcaaggtaatactgacgttgtatcagcgttattaaccaagctgtctgatgaaggtcgcctaccattgtcagaggcgttgatgggtattacaggtactaaaacatcatcacaattgagtatcttacaaaatcagttcgccgatattcaatcacagttagaaagtattatgtattcagtgacaaaaatggtcgattgaacaagtggctcatgtagttagaatcgcctacaagaccatctacaactggattgagcaaggagtattggatattggcgtggctgatttacctgaccatggaattcgccgccgacgagccaaagaaacccgtgggacttttagccatggacgttccatttaagatcgtcccgctgaagttattgaccgtcatacctcaggtcactttgaagcagatacagttttatctggaaagcgtaaaggtcaagcaatagctacgtttgtcgagcgtaagagtcgtcttatcatcgttaaacggcttcagggacgagatagtacctcaataaccaaggccattttagaattagctaaccagttagaagataatctcaagccccttactgttgaccatgggaaagaattcgctaactacaagctaattgaaaagcaggccaggattcccctatactttgcgcatgcttattctccacatgaatggggcagtaatgagaatcgcaaccgagtactacgacgctttatcccaaaggtcaaccgattgagaaaatcactgatgatgagttaattcaaattaactcgtatttgaactccaggccactcaaatgcttaaactggcgcacgctaattgagatctttttgcgtaatctgcgtcactaactttgttcaagttatttcttgcaatctgccgtttgaaaagagattagccttggcggttagtctcttttactatctggtaagttgactgcaaacagaaaagagagacaagcggtcgtcaaagtcgctaaaccgtgctataatgttatcggatttaaaaataccactagttattaaatttgggaggcaagaataacgatgaagcgacttaaatttttagaaactaaacgtacaccgcgttatagtctgcgtaagtttagcgttggtgtggcttcggtattattaggagtaaccatttttggaattaactttacaggtcattctgtaaaggcagcaaccacagaaagcgttgaagattccaatagttcagcaaacagtaggttgcaacaaactaatactcagaaagaaactagtgcaacaggaaaagttcaacaaagtagtgcaagtaacgatgtaacagaaaaagttcaacaaactagtgcaagtaacaatgcaacagctaataattctacagaagctgcgacaacctcacaatctgcaccaaatacgcaaggtagcgctcacactgatattaaatcattagcagctaaatcagcagcaaaattagcagttatgaatttaatggcagcttctggtactggtactaatactggtactggtactgacagaaatgcaggagatacagtagatcaaaataacattaatgatcagccagctaaagaaaatcaaaaattggccaatgagcataatctaacttcttcagataactacagttctaatatctatcaaggtaaagataaaaattattacaaggttgtaactatttatggtaatgactacgtttaccatgctgatgatattcaagctaatggtactgctcgtgggcaatgggcaacgacagctgaagatactaaaaataatatcaatatttctaaagaagatttaggacatggtaagacccgttggactgttgttttcttccctaataagggattacaaaatgttggcggtaaagtaaatgggttagtttctgcaaaatttggtattgctctcactaatgactaccaaatcgttggtaatgttgatatggaagtaaataatgagactaatcaaaaatatatatattataaatttgaggatagtagcaatagccctactagcattacagtacaaaatccaccagctgaagtagacttttcatttaatcctaacacagatgttgattcaaatactggtttaattaatagtaaaaccttgccagcttataacaataaatatttgcaaggctcatactatttcactactgctactaatgctggtattaggaacttatggcagacttactttgaagatgctgatgaacgtaataatgcatatgatgggtcccccttatctaggtggcaatcatgactttcattttaataattttataattaaaaataaaactggagttgacggtttagaatctaaggaccttaaggaccctaaggcccaaatcccaatcatttatgacacactgggggataggaagtttaacagtgaagctaattctaagggcgtatttagcagtgataactttaaccaagcaatggaatttaagtcacaaggtgacgcaagtaacgtttttattgatcgatcacaatattcttcttatgttatttcctttactacgcaacacacagactctcatgaagtagaattattttcaggtccgaaaaatcaacaattctcaggaatctcagctaatatttattcctatcagaatggtcactataatatgttttctagattatatggtgagcagagagcactggatgcagctggtgcagtagtaaaagctaaagatatgattcctggttgggttgatgccaatattgctacggctaagattcatactgactatttaaataatgctcaaatttatgctttgcgttataaaattcaaaataacgttacagactctaatgctttaaataacattattacagaaggaaattccttaaacgatgctatgaaaaagcttggtaatagtatcggacagtatgattctgatggcagttttgctgatcataaggaagatacaacaaaggaatctgatcgctataaatacgcaaatccagataaaaaggcagcttatgacaatgcaactgaagtaactaaagctttgattaacaaagatacaggtgcctatgcagatcaagcgacggtagaaaagcttactgaagctgaaaataaggcttggaacgaacttaaagttgtcctagcaaataagatcacaccaactgttccagcaaccaaggaaccagtagcagataccagccacttaactaaagatgaacaagataaagttcagaagaatgtggaagacgctaataagggtaacttcccagaaggcactacagttacagtaggttctgacggtacagctacagtaacttacccagatcagtcaactgatacaatcaaaggtagcgatttagtacgtccaacggaagataaagataactacgatccacatggaccaaagaatccagatgacagagttccagtaaaagatcaagatcatttgactgatggtgaaaagaacgatgttaaggacgaaatagggaaagaaaacccagatctaccaaagggtacagaagttgacgtagatgataagggtaacgcaacaataaaatatccagatggttcaaaggacaccataccaggtgaccaattagttcaaggccaaaagggcgacacaactgatgctggtaacattacgccaactgttccaggtgacaaggtaactgttaaggatccaagtcacttaactgatgatgaaaagaatcaagttaagaacaacgtcgataatgtcaacaaggataagttcccagcaggcacaggtattacagtaggcgatgacggtaccaccacagtaacctacccagatggcactaaggacaccattccaggcgatcaactagttcaaggccaaaagggtgacacaactgatgctggtaacattacgccaactattccaggtggcaaggttactgttaaggatccaagtcacttaactgatgatgaaaagaatcaagttaagaacaacgtcgataatgccaacaaggataagttcccagcaggcactgaagttacagtaggcgatgatggtacaactacagtaacttacccagatggttcgaaggatgtcattgctggtactgatttagtcatcgctgctaaaagcgaagatgttcctggaagcaagcatcattcacacaagaatggttcaaactctagtcaagttgatggagttaagggagcttctactgctaatggcagcatcgcaaacgctggtaacaacctaggtgttaagggtgaaagagataatgctattggtaataacaaggctactagcttaaagacattaccacaaacaggcactaaagatacttcaattttgggtgtgcttggtatgcttttagcttcacttggtctattcgtatttaagaagaagcgcgatgaaaaataatttataatagttttttataaattctattgataaacatatctagagaaagttaattctcagatttaaaaagacgatcgaaaacttttgaaaaattgtttttgatcgcctttttgtgtgaaatgaaaacaagattctacgtaagcgtaaaataaccgagtatctagattagttttagatttcaattatgattaatttatcaatattttggaggttatttatatgtcagaaaaaaagctaatcgtccctcttgctcgtgagccaaaagctaaaaagtctaagccagctcgtaatcatttactgctttctttaaagaaaaatgacctagaattagacttccaatgtcattaagttaagctattgacttttgaaaactgatctttttaggaattgaatcatttggattcgattcttttttttgcaaaaataaaggcgaaaagacaaacgaaatttaaaagccaagtctgcagtatattacatgtatcgcgtggcctaataaaaaagaaatacaaactacgcttatttggcgtacacaaaaaagcatcaaattggctatctaaagccaaatgatgctttaattgtttttttctccaatgtcaatagcttaacttaatgacattgattaaatttgcgggctttatttatttttatattgccaacccaacaagcgagaaaataatttcactaattagtactaatagaacatttactaagatgcctgtaaaggttgattctttatgtggattttttacgaaagtcttagttgtgtggtaaacaagcggaatagtaagtaaactccctaaagtaataattggcaaatattttaatactattcccaatattaaaaagatgtaggctaatacatagtaacaacataaaatagtcagggcagtttttcgacctgtatagtatggcaaggttttacgtccgattttgacatcttcagccacatcgcagatgttgttggctaacatgacattggcaatgacaaaaattgccggtccagcaacgataatggctttagcccagaaaaaattatcgaagggatgcacgttatacatgttgatatataggcctaaaaatgtaatgttgtagcccattgtaattcctgaagctggttcaccaaaaggagtttttaaaatggggtaagggccacctgagtagcaatagccgattagatagcttaaaatcccgattaataaaataatccaaccgactttaatgctaaggatagttccgataattacagaaattaacgtcaaaataatgattatttttcgagcccagcttttcgtaatattaaatttctctaggatattgttgtagctagttatatggttttgcttataacgtgcgtaatctgtgtattgattatgaccattaactgctaaatgaaagcaaatcacagctaaaaatagccataatgaatagactagattaaagttgtgataatagtagctagccatcaccgagccgataatatatggcagagccgagataataattgtttggatttggaccaaggcattgaatttttgtagtgtagaatattttttcattggttcctccataagtattaaatagccattatcttcagtataaatagatagttataatttacaattatcttgggtagaaatcttattgtttagaattaagaaagcttaatattattttttgtggtggtcgatgtaagtcagcaaagccaacaaaagcatcaaaaagctactctcgtaaaccgacatggttgaactctttctgtagtatgttgaccattgttaaaaaaggtgaacgcgtaaaatactaaatttttactctaacaaagtgtctgggaaaaagtttatttttaattaattttagactttcactcaaaaaaatcctaataaatcaaggtttattgataccaagatttattaggatttcttaatttctgagtttttcccagacactttatttagactattttcttaacttgtgcaccttatgggctagaaccatttctttattgcgatcttcatagatcatatccttgatgtaattccatgggattaacaaaggcgttttgctatttttacggaaaatgaagtctgcgtgtcgtctttccaagtgacgcaaatatcttttagcattttgaatcttagtatggtgttccaaatgcaatcgtggttcgaaatcgacgattttgtgttcagcgttgaaaataggtctaactttatggtgccagttctcagcactagagatatgatcgctgaccttttttccggcttctacgatattctctttggttgctggacttttctgatccttaaactccgcatgtggatctagatagtagttgcccaaaccatcttgacgataaagtcgtattttcttgaatgtcttatttttcttatccattcttacttcgataacgtcaccatttttgtgattcattaaatacatgtgatgttttctagtgtaatttgcacttttcatgatcagaaatctcacctctacattaattattctgaaacgatattataccagtattttaactatatttttgctttacgagtataaaagtttataatttttaaaaagaaatttcaattcttgataattagagaaggaaaaaagagactgtaaaatagtttgtgtaaggatgaatgattccttaaatttatttctttaaacattagaaaaaggagttcctttctcgtatgattggtttgaacaaaaaaacacatacagaaagaagaactccttcatgaatgattttaccaaagattttgctcaagctctattcaatccagacaaaataaatgatttattgcgcaaagagctacaacaggctgttaataacttgttagaagctgaattgactgcctttctgggctatgattcctatgccagaaatggctggaatactggcaactctagaaatggtgcttatttccgcaaagttgatacgcaatttggcccaattgaagtgcaagtgcctcgggatcgcaacggtcaatttcatcagcacacgctgcctgactacaagcagcactcggatatcttggaaagcatgattatcaagctttactccaagggcgtgaccaccagggaaatagccgatctaattgaaaagatgtatggcagccattacagtccagctcaggtatcaaatatttccaagcagatgattccaaaggttgaggcttaccacaaacgcaagctaagcgacaagtttttctgcgtctatttggatgcgacataccttcctttgcgccgagaaacatttgagcgtgaagcagtctatattgccattggcatcaagcctaatgggcacaaggaggtcattgactactgcattgcacctagcgagaacattgaagtctggacagatatgcttcaaaacatgaaatcccgaggcttaaagcaagttgagctttttctttctgatggtgttgttggcatgaaaacagccttggccaggacttatcctaaagctcattttcaacgctgtttggttcatgtcatgcgcaatatctgcgctaaagtacgcgtcgacgatcgtgaaaagatcatgaacgaattcaaacaggtgcatcaacagacaaacaaagaagaagccacagctgtcctgcatgacttctataccaaatggggcaaggtttacagccatgttatcagaagcttgaaagacatagaaccagatctgctggtcttttataactatcccaagcagatcagagcttcaatttattcgactaacatgattgaatcatttaacaatgtgatcaagcgcaaagctaagcctaaggcagagtttccaactgaacagtcgcttgatgcttttattggcattcaggcaatgagctacaatgaccgttatttcaatcgaattcataaaggctttggtcaggttcaggacaccttagaatcctactttgattaaataaataattaaaaaatcaatttacgagaaagaactatttacacaaaagatttgacagtttcggaaaaaatcctaatgaagaaacttaatatattttattatgctaccatttggagttttattattggaatatgctgtgctacatatttaaacttaattaattttattattaattttgtctggcatgttttgtttgataaattacctgttcctagtcaggctttaccgttttttatttgtattccttttggtttcattattggtatattaattaagcgtttaggatcatatccattaactatcgaagaagttttaatgagtgttaagcaggagggaaagatcaattatcacaattggtggaaatccttaaccttaggtcttatttctttagccgcgggtggcagtattggaccagaggcttcaactactgtactaggaagtggcatggttaattggctgggagatagattacgactaattgcttattcttctgattggaaatggaatcatttttgggatactatcgtttcgaaaaaacaactaaaaaaactgccaaaatttagtagcctttttaaatcaaaattgtatcaaaaagttttttgcttaattatggttatgatcggcgtggttggtgcagcaatagtctttaaattattccctgaagaaggattatttggtattcatcatcgccatattctctggcaatggcgctatagtatgtatgtaattattctattaattgtaggttggagcttcggtatgtttttcttatggagcgaaaaatggagtgattattttgctaaaaaaattactatttcaccgattattaaagcaactatatggggaatagttcttgcattacttaccttaattactagttatgccctgtattctggtgaatttcaaattgttccatttgtacaccaggcgttgcaaatctcaccattatttttgctagttatagcagtcatcaaaaccttgtctactaatataggttttagtttaggctggcgtggtggaaaaattttcccttcgatttttgctagtgtagcagttggcgcagcgattgcgcaatttttaccaattatgccagttatgtgtgtagccattacagttagtgcaagtattgcagttatcttgggtaaacctttattaacagctattttattgattctgttattaccaatagagttggctcctgtcattttagtaagtgcgtatttatctgcctgtttgacaaaagtgagctatagttttagacaaaagaataattagggaggtatttttatgaacgaaaaaaacgatgcagtaactggtgcttctttgatagagaatcaagaagaaaaagtaaaaagcccatggccgggtcctaaaggtatgattcctgtaacaagtgggcgtgctgacgatgctaatgtacataatcgtgcctacttagacaatatcttggtggagatgcgtttgcttgattcagttgagccagacttaacaactgagatttttggtaaaaaatatgcctcacctttaactctggctgcagtctctcatttgaacagggttttaccagataagacgcgtaagccaatgcaagaaaaggcacgtgcggctaagaataccaatactttaaattggattggcatggagtcaaacgaagaatatgccgaaattgtcaaagagggcggcgatacagttagaattgtgaagccttacgcagaccatgataaaattatgggcgaactaaaacaagcagaagaattaggtgccgtagctgttggaatggatattgatcatgtgcctggtgataatggtaaatatgatgtagtcgatggtattccactaggaccgatttcatttagcgatcttgaaaagtatgttcatgcagttaaactgccgtttgtggctaagggcgtgctatccgtgcgtgatgccgttaaggctagagatgctggtgccaaggcaatagttgtttcacatcaccacggccgcgttccatttggcgtgccgccactaaaagttttgccagcaatcaagcaagcactaaatggcagtggaatgaccatttttgtagatggatcattgatgactggctacgatgcatacaaggctttggccttaggcgcagatgctgtactgattggtcgcgggattctttctgaattgttaaaagacgggcaaaaagcaacagaagataagattaagaaaatgaatgagcagcttgcacaaatgatgttatatactggcgttaaagatactaagtcatttgatcctagtgtgttacattttgattaggatagaaaaatgaaatagtttattttttacagtttactataattaagtggctattagcctataataaaggcgtttaaagctatactgaatagtgttatgcttaactcggacgttgttataaggtaattatttaaaagtaattagttgtatacgaaaacatgcttagctatggtaaaagctaagcatgatgtctcataatattgagccgcttgtagattatactacaagcggttttattttagatgaaaataacaagttttcaaaaagtgagtatctatgttttgctattatggaaatggattgatttagaaaatgatgctattgaaatttcattatgagcggggatgcaaaaccttttttaaaaagcataagaatgagcaaaagataattaagcagttaatcgatcaagcgattactaaggaattggcaactggtatgactaaagtgaagatcgctgcaatgactcggattaagggaaaatcaatttacgagtttcgcctaaatttgaaaaaagcgggttcagcgagagtcgcttttgcagtaaaggatgagcaagtactagttcttttgattacctctaatttacagaaggatagttttagtcatgaattagaaactgttctgaaaggaagtcattatgcgtttaattccaattaagcaggcagagactttgctcaaaaaaatgtgtagtaataaaagtaaatatgtagaaattaaattattaacggcaaaaaaggatcgttcaattagtgtgaaaaatgatggtaaaaagctaattttaactgaagatggctatttgaactttacgcaggaatatgaattgactgatccagctgttggccgtcatgcagttttagcggcttttaaaaaggaatttccgcgtagtaatcgtgcatatctgattgctaaatagtatactttaactataagaaaaactatcagtgttgattagaaaggaagtctttttatcaatgaaatatgcagaaaaatctcccgcattatgggatgccattcatcatgaagaacagcgccaacaagacaccatcgaattaattgcctctgaaaatattgtttctgatgcagttcgtgaagcacaaggttctgttttaactaacaagtatgctgaaggatatcctggtcggcgttattacggcggttgtcaatatattgatcaagttgagcaactggctattgattatgcaaaaaaattgtttaacgcaaagtttgctaatgtgcagccacactctggatcacaggctaacatggcagtttatcaagcacttttgaagccaggtgatgtcattttaggtatgggcatggatgctggcggtcacttgactcatggatccaaggttaacttcagtggtaaggaatataagtcttacagttacggcctaaatgttgagactgaagaactagattttgatgccattcgtgaaattgctcttaaggttaaacctaagttaattgtagccggtgcttctgcgtacagccgcatcattgattggcaaaagttccgtgaaattgcagatgaagttggggcatacttaatggttgatatggctcatattgctggcttagtagcaaccggtcaacatccaagtcctgttccagtagctgatgtagtaactacaactacacataagaccttgcgtggccctcgtggtgggatgattttgtccaacaatttagaaattggtaagaaaatcaattccgctttgttcccaggcattcaaggtgggccacttgagcatgtcatcgcaggtaaagcgcaagcattttatgaggacttgcaaccacaatttacagattatattaagcaagtcattaaaaatgctaaggcaatggcagaaacttttgctgaatcggacaatattcgtgtcgtatctggtggtactgataaccatttgatgattatcgatattactaagactggtattaccggtaaagatgctcaaaatttactcgactctgttcacatcactaccaacaaagaatcaattccaggcgatcaacgttcaccatttgttactagtgggttgcggattggtacgccagtaattactagtcgtggctttgatgaagcagatgctaagaagactgcggaaatgattattgaaattttatctgatccagaaaatcccgcaacgattgcccacgttaaagaagaagttcaggcattaactaaaaaacatccaattgaataatttgtgtagcagaatttagccgtcctagttctcagctggggcggcttttgttataataaaaaattaaaaataatggagttaagagtgaaggaaacgtgattatttggaaaagttaaaaagacataaaataggcttattttcagcgattatgctggccttgaattctttaattggttcgggctggctttttggttcaggttctgcagcacaaattgcaggtccagccgcaattttatcttggattttaggtgcagtaattatcatctcaattgcattgacttatgtagaattaggttcgatgtttcccgaaagtggcgggatgagtcgatacgctcaatatagtcatgggccgttattgggctttgtggctgcttgggctaactggatttcactagtcacattggtaccgatggaagccgtagctgccgtgcaatatatgagttcttggccctggagctgggctaactggactaaaaattttattaaaaacggcagtattacttttgctggcttaggtgtggttattatttttatgctgatttttacaatgatcaattttgggtcagttaaaatcatgacccattttaccaatttgatttctatttttaagatcttattgcctactttgacgattacagttttaattgcttcaggttttcatggacaaaactttggcagtaatttacatgaatttatgccttatggtagtcggtccatttttgaagcaacttctgtttcaggaattattatgtcttatgatgcctttcagacggtcatcaatatgggtggggaattgaaaaatccgcgtaagaatattgtgcgtggggtattgatctcaatgttaattactgcggcaatctacattatgttgcaagtgacgtttattggtgcagttgagccaggcatgttagctaaagtaggctggcatgggatcaactttacctcaccatttgcggacattgctattattttaggcattaattggctagtgattttgctctacctagatgcatttgtttcaccatttgggacaggggtagcatttgtagctacggcctcaagagccctagcggcaatgacacacacacgtcatttgccaaaatggttaggtagattgaatcaaaaatacttaataccacgttatgcgatgattgctgactttgttttggcggttattttagtaagcttatttagaaactggaatttactagcaacagtaatcacggcctcaactttgattgcatatttgactggtccagttacggtaatgactctaagaaagaaaagaccagatcttgatcgtccatttaatcctggttatatgaagtggctagctccagttacctttatactaactagtttggcaatttactggtcaatgtggccaacgactattcaggtgataattgttattgccttgggtttgccgatttatttttattatgaaattcactaccaacattcaaatttaaaagaacaattacatagtagttggtggatgatcggttatttgatttttatgtcacttatgtcctttgtgggcagtagcggttttggtggtcagaactggattaagtatccatttgactttgtagtaattatcattatttctctcgccttctattattggggaattaagacagggttaaagaaaatcgatccttatgctgaaaaaattgcgcaaaataaagaataagtaaaaaaactgttgggatttttagtctcaacagttttttgttcgctattctgcttcatcaagatacttatttagcaccttgaaaacaccgttgtcgttattagtaggtgcaataaatttagcagtctttttaacgatatcttgaccattagccatggcataacttaaaccagcaaatttcaacatttcaaggtcattttcaccatcaccgaaggcaattaattcacttcttggcacgtctaaataagctaaaaattcctttagccctgcggctttatttacaccttcaggaataatatccatgtagctccaaccactagttgtgacgtggattttttctgtactacggctgttgaagccatgttctaattcatgtcgaatcttgctgggatagtccattgtgatcttagtgtattggtcatcagcaggaattttattaaaatcatcaatttcgatgctattaggataaaaataatgatgggaccgcttgtattctggtggtgtactttttaaaaagtaggagtgcttaacgccactaattaaaatgttttgggctgcaccaggatagcgtgcgtgcaaatattcaataaaatttaggatgcatttttttgaaaagcttgttgtacgaataatttttccatcgcgaactaagaccgcaccattgtcggcaacaaagtcaatagaatcgataaattcgctaaagtcatcagccaaacgaccagctgggcggccgctagcaataataaaatgtgccccgtgttgatgcagacgagttaaaatctcgctaaacatttgatgatcgtattgtttttcatcgttaacaaaagtaccgtcaacgtctacagcaacggccttaaagggaagagtagtcatctaattacctcactaaaatttgataccgttaacagtttaccatttcttgcaagtgcttacataaattatttatattatgtttaacaataaatttgaaatttacgaggtagaaaaaatgacaccatggtggaaaaaagcagttgtttatcaaatttatcctaagtcatttcaggacagcaacggtgatggcataggtgacttacaaggaattattgctcgtttagattatttggaaaatctaggagttgatgcaatttggctttcaccggtctatcaatctcccggtgtggataatggctatgatatttcaaattatgaagcgattgatccgcaatatggcacgatggctgatatggatgagttgattcagaaagctaaggagcatcatatcagaattgtaatggatctggtggttaatcatacatctgaccagcatcaatggtttgtggaggcacgaaaaagtaaggataatccttaccgagactattatatttggcgtgatcctgttgatggacatgagcccaatagtttgaagtctgctttttctggttcagcttggaaatttgatgagcaaacaggacaatattatttacacttctttgcggaacaacaacctgatttaaattggaaaaatccagagttgcggcaaaaaatctacgatatgatgaacttttggcttgataaggggatcggtggcttccgaatggatgtgattgaattaattggtaaagatcccgacaaaatgatccgtgaaaatggtccgatgcttcatccatatttgcaagaaatgaacaagaatacatttggtgatcgagatgtgatgacggtgggcgaaacttggaatgcgacaccgaagattgcagaagagtactcagatccagcacgtcatgaattatcaatggttttccaatttgagaatcaagctttagaccagcaggagggaaaagaaaagtgggatttaaagccgctagacttaggcgaattgaaaaaggttttagtaaagtggcagacagagcttgattttaatcatgcttggaatagtttgttctgggaaaatcatgatattccgcgcgtaatttcacgttggggcaatgataaaaaatatcgggtgcagtgtgctaagatgtttgcgacagttttacatttgatgcacggcacaccatatatttttaacggtgaagaaattggtatgactaattgtccggtaaaaaatattgatgaagtagaagatattgaaagtgtcaatatgtatcatgaacgtctggctgaaggttatgacaaagataaactaattcatgcgatcaatgttaaaggcacggataatgctcgtcgtccaatgcaatggaatgatgagaaaaatgccggctttactaagtcaaagccatggttgacagtaaatcctaactacaaagaaattaatgtgaagaaggccttggctgatcctaattcgattttttatacttaccaagaattgattactttacgtcatgaaaatgagattgtggttaatggtgactttaagttggttcatgatactggtgatgaagttcttgcatattatcgtattttaggtactgaaaagtggttggtggttgctaacctatctggtgaagagcaacagtttacgtcgaccgatcgcattaaagaaaacttgcttagtaattatgctgtgcgtaatgatctgcatgatattacgcttaagccttatgaagcatttgcagtggcaattaaataagctaaaattaaaaagaacttgaattactaacttgaagatgttattctagttatcgttaatcgattaatctatgatctgtgatatgatcatggcaaaggagtaataaattatgaaacaaggtattcatccagaatttcaagaagtagttttcatggactcagcaactggtgctaagttcttagctggctcaactttgaagccatcagaaactattgactacgaaggcgaaacttacccattagtacgtgttgaagtttcatcagattcacacccattctacactggcaagcaaaagtttgctcaagcagatggtcgaatcgaaaagttcaacaagaagtacggtttgaagaagtaaaccttttatctggtggaagcagtcccattggggctgcttttttcgttagagattatttggcagaatgcatgaaagacagtataatgttttctgtataaaaatgtttttatgggagtaaatattcaatgaaaatgcaaatggcggaaattgccaaggctttaaatactacttgtgaaggtgacaatcaaactgttattacttctgttgcctttgactccagaaagatcacagatggtggattatttgtaccacttgaaggtgaacgtgatgggcacgaattcatagctagtgctattaataatggtgcttctgctactttatggaaaaaggggcatccgaacaagccagaagatattgcggttattgaagttgatgatccgcttgctgctatgcaagagcttgctcgctattatttgcgtaaggttaatccaaccgtagtgggaattactggttcaaatggtaagactactaccaaggatatgattgctgctgttttgtctaaacgctttaatgtacataaaactcaggccaactttaacaatgagattggtgtgccaatgaccatccttgagatgaagccaaatactgaaattttggtgcttgaaatgggaatggacagaccaggtcaattgcatcatttaagtgaattaacccatccagatgtggccgtaattacaatgattggtgaagctcatattgaattctttggcagccgcgacaagattgcagatgctaagatggaaattactgactttttgcgtgaagatggcgaatttatcttcaatggggatgaaccattattgcaagaacgtgctgagaaattggatcaagctaaagcaacttttggttttagagatgaagatacagttcatgcaactggctttaagagttatatgcatcatgctacctttacagttaatgattcagagcaaaaattctcaatcccaatgattggtaaacacaatgtttctaacgcaatggccgcaattagtgttggtcgtcattttggtgaaagtgatgaggaaattgcctcatcattgtctaactttaccccaacggctaatcggatggagtgggaaaaaggcgatgctggagaaagcatcatgagtgatatctataactcaaatccaactgctgttagagctgtattgactagttttggccaagttgaagtaaaagataatgggcgcagaattgctgttttaggtgatatgttggaattaggtaaaaactcccctgaattgcatgctggccttgaggatacgttagatccacaaattattaacgaagtttacttatatggctctgaaatgaagaatttgtatgatgctttacaagataagtatgagccagagcatttgcattattatacacaagaacagacagatcgaatgattgacgatctgaagaatgatattaagtcggatgacattgttgtattgaagggttcacatggaatgcacctggaaaatgtcttggcccgactaagataggagaacaatttttttgaagttttcagaattaggattaaatgacgcgcttcttaaggcaattaaacgttcaggctttgaagaagcaacgccaatccaggaacagactattccccttgctttgcaaggcaaagatgtaattggtcaagcccagactggtaccggtaagacagctgcgtttggcttgccaattttacagatgatcgacaaaaaagaaaaagcaattcaagcggttattattgaaccaacgcgtgaacttgctattcagacgcaagaagaattattccgtttaggtcgtgacgaacatgctcatgttcaagtggtctatggtggagctgatatcggtcgtcaaattcgctcattgaaacaccatgtaccatcaattttagttggtacgccagggcgtttgcttgaccacttgaaacgcaaaactattaatttagatcaagttaaggctgtcgttctagatgaagcagatgaaatgctcgatatgggttttattcaagatatcgaaagtattttgaaatatgctaagaaccgacaacagacattactctttagtgctacaatgcctaagcaaattttgcggataggcgaaaaatttatggatcacccagaaattgtccgcattaaagctaaggaattaactgctgatttgattgaacaatattttgttcgtgctaaagagtctgaaaaatttgatattatgtgtcgactaattgacgtgcagggtccagatttggctttagtctttggtcgcaccaaacgtcgcgtagatgaacttacgcgcggtttgcaagcgcgtggctacaatgcggcgggaattcacggtgatctatcgcaagcgcgtagaatgtcagttttgaaaagatttcgtgaaggtaagctagatattctggttgctactgatgtagctgcccgcggacttgatatttcaggcgtaacccacgtttataattatgatattccccaagatccggattcatatgttcaccgtattggtagaactggtcgtgcggggcaaaatggaatctctgttacttttgttacgccaaacgagattggctatatgagaaccattgagcaattgactaaaaagaagatgtcgccgcttcgtccgccaacagatgatcaggcattacatggtcaattaaagcaagcaaaaattgaaattgaagatttgatgaacggtgatttgggtaaatatacccaaggggcaagtgagctgctggataactattcagctctcgacttagttgcagcctttttaaagaacttggctaaagatgaggttaaagtcaagattaccccagaaaagccgttaccatacaagggtgatggtcgccgccgtcgtggtaaaggtcatggccgtagcaataataatcatggacgcgataaccaccgccgtcgtagtaacaataattcataccgccaaaatggaaaccgcggtaagcgtggtcgtggcaacggacatgaatttgtaatcaagaataagaaagattaggattttatcttaaaaagggaagttgtaatttttacagcttcttttttgtattataatgatgtcattgtgtgaggtgaaaataatgattaaaggagtaggaattgactcgattgaagttgaacgagttaagaagatcgtggacaagggggatgcttttgccaaaaaagtattaactcccaaagaatttgatcaatatcaaaaaatggcaggcaaacgtaaagttgaatacctaggcggacgcttttcattaaaggaatctttttctaaagcaatgagaacgggtctgggaaagtatattggttttcaagatgtcgaaactttatgggatgatttaggtcatcccgttatgacttcaactaagtttgatggaaatattttcccaagtatcacacatgataatcatgaaattattacatttgtagttttggaggaaaaataaaaatatggttccaggctatcaccgtccagccgttgtaaaggtaaatttgggcgcaattagaagaaatataaaaaacgaaatgaaacatcttgcaacagggcaaaagatgttagctgtagttaaggccaatgcttatggtcatggtgcagttgaggtggctaaaattgcgattgaggaaggtgcagcaggcctttgtgtagctattttagatgaggccttgcaattgcgtcatgctgacattgttaagccaattttagttttgggagtagtttctccagaatacgctccaattgcggccgcaaacaatgtttcattaacgattcctaaccttgaatggctaaaggaagcagaaaagtaccttgaaaaagagcagttacagttgaaagttcatattggagtagattcaggcatgggtcggatcggctttaacgaagatgaggattttattgctgctaataaattcttacaaaataacgataatttctacgtagagggtatgttcgcacactttgcttccgcagacagtgctgatgatacttactttaagcatcaggtagaaaaatttgctcatatgagaagtttgttgacagttaagcctaagtggattcacgtagacaataccgctgccagcatctttaacaaggatgtgcctagtgattgtgttcgttttggaattggcatttatggtttgaacccatcctctaatcctgatagtcctgacttgaagtcatcaatttcgcttgaaccagcattatcatttgagagtgaactaactcatgtaaaaactattcatgaaggtgacggagtaggatatggttctacctttgtagctgatcaagatacaattattggaactgtgcctgttggttatgctgatggctttattagaaagtttcaaggctttaaagttaaagttggagacgaatactgtccaattgtcggccgaatttgtatggatcaatttatggtcaaaatgccaaagaaaatgccgttaggaactaaggtggtcatcatttccaatgatccaacagcgccaaataatattaaggccgccgcagattatgttgatactattcactatgaagtagcatgtttgttaaacgatcgtttacctcgtgtttactatgaaaaataagttaggcaataaaaaaatgcttctagaacaaaaatctagaagcattttttggtagatcagttttttaatccttaacagggtgttcaataaagacacctggattttcatcactcataatagtcatgccggcttgcaaatcttcgatttcagaaactacgaaaccttttctttgtaacttatcaacaatcgttctcatggtaatatctgagacaccagcggggagagtaaagagtgttcttctaacaaaattaccttcgagttcgccagcagctgcatcaagtgtcattacactagacatattagtgtgcttagacacaatcttggacatcttgatcaagttaccacgtgtattgtcagataaaacggtcaaaacgtatgaaccatttttaacatcccacgcatctgacaacatatcaagcattcttgagtgagtaagaataccataaaaatgattatcttcatcaaggacagcaatataaggcaagtccttaatgttgaaaaataccttgaagaatggtgaattgaccttaattgtcttagtggcattcttaagtaagtaagttactggtagattcatatcgccaccttgtgacttatgacggtagatatgcatcttataaatgttaccacggaaaatagtaccagtatcgtcaacgattggcacacatctgtagcctgaatcttctaaaacttttaaagcttctgctaatgtggctttttcattaactgttgttaaataatcttttttaataactaaagatttaataagcatgagttcgcctccgaaagtgagaaatgtttcaagtaattatagcatagttgatgagttaattaaatattaattaaagttcatctgaagtaacaactatattttaacaatagttagacaaataaaaaagcatctccgaaaaaagagatgcttttaagtgaaacaagttttagattattgacgaaccttaacgccagtttccttaaatgccttgtccataaccttcttcaattgatctgcagaagcagtcatcaattcttgttccttgtcacttaatggcatttcaatgatttgttcaagacccttacggccaacaactgcaggagtaccaatgtgaatgtcatgtaagccatattgaccgtccataggaactgaaagtggaagtacacggtgttcatcgttcaagatagccttagcgatcattgctgaagcagtaccgattccgtagaaagtagcacccttcttgttaattatttcgtaagccatgttagcaacttccttgtggatgtcttcaagcttagattcatccataccgtgagccttaacccagtcactaacctttacgccaccaacattgttgtagctccatgctgggaattcagtatcaccgtgttcaccaagcatgtaagcattaactgaacgtgggtcaacatgttccatttcaccgataaccttttgaagacgaccagtatcaagtgaagtacctgaaccgataacacgatccttagggaaacctgacattttccaagttgcgtgggttaaaatatcaactgggttagcaacaactaagaaaataccttcaaagcctgattcaacaactggttcaacgattgatgataaaatcttcaagttcttgttaacaaggtcaagacgagtttcgcctggcttttgtggagcaccagcagtgataactactaagtctgcatccttacagtcagggtagtcagctgcatagatattctttggtgaagtccaaggggtagcatcagctaagtcaattgcgtcaccttcaacgtgttccttagcgatatcaataatacccaattcttcggcgataccttgttgtaccattgagaatgcgaaggttgaacctacagcaccatcaccaacaagaataactttacgaggtctttcatctcttggcataaataaaaatctccttttttattagtgatatttttaacaaaatgaattataccatgatagcaagcattaataaaattattatttcctaattgtgctattatatgtaagattgtgtgcatagtgaggagtaaaaataatgaagataattgcaggtttaggtaatccaggacaaaaatatgataaaacaaagcataatactggtttcatgacaatggatcattatttgaatgaaaagggtttgtcactggataaagataaatttgaaggtcattggactaagcaaaaaataaatggtgaagatgtaattttgcttgagccgcaaacctttatgaatgaatcaggtcgttcagttagtcaagtggctaacttctttaaggttgatccagcagatgtgctaattattcaagatgatatggatatgccaattggtaaaattagaattagagctaatggcaaatctggtggacataatggaattaaaagcatcattcgagatttagggacggaaaagtttaatcgtttgaagattggtattcgtcatccgaaaaatgcaacggttgtttcatgggttttgacaccatttaatgatgaacaacaaaaattgatggatgatgcatttgcgataagtgtagatattattgacgactttatcagcggacatggtagtcaatatttaatgaataaatataattaaaatgcgtttaacagagattttagataaagatcaagatttaaataattttatttcaaaaacaaaacaagtaaaaaattcactaatcactggcgctaatgccggtgcttttagtctattgctaaaacagataacaactaaattagcagctccacttattttaattgaagaaaacgaaagtaaagcacaaaacttatatggtgaactcagtgccattatggcagatgaaactgtgcaaatttttccagtagatgctacaattgcaacgcaaacggcagttagttcgcctgatgaactgagcagccgaattcaggcacttaattttttgttaagtggtaaggcaggaatagtggtaacaacgccgcaggggctgcaatacaaactgaccaatccaactgattttgcgcaggcaaagcggagttttgagccaggtcaagaatatgaactaaaagaactcaatgaatggttgcttgcttcagggtatcagcgtgattctttggtagcacgaccaggcgaattcgccatccgtggtgatattttagatgtttatccactagatcgagaaaatcccgtgcgaatcgaattctttggtgacgaaatagatacaattaaggaattcgatttagctagtcaacggagtcaaaaagagttagacaaagtagaagttgcagcagctcaagatcgagtttttactaaggatgcaattgcggcagcggctaagaaaattgaacaagatatggccagtgcaccagctcccgctaaagctgtcaaggaccactttgcggcagttcttgatgaattaaacgatggcggtttacctaaaaactatgctttcttaattgactatttgcttgaaatttctagtagtttactcgaatatttgcctaaaaatgggcagattttatttgacgatttgcctttaattaatcaagcggttgaaacagttgataagcaaaacgctgcttttattaatgatgaactaaaaactggtgcaatgttgccagggcaaagcttgcggtcagattatacaaagattctgagcaaagataagcaccatcgcatttatttctcattgtttcaacgaagcatgggacgactgcgcttaggccagatgctcaattggtcaacacgtgagccagaacaattctttagtcaaatgccgctgattaagtcagaattagaatcttatcaaaaggcggggcaaaccgtcattttacaggctgataatgaaaaaagagcacagcaaattgatcaaacaatggttgattttggcttaaatttaccaattgttggtgcagacgaaattgttgaacaacggacacaaattgtagttgatggctttgttagtggctttagtttaccaacagttaaattggtatatctaacggagcgtgaactatttaataagcgcccacaacgtaaaaaaagaattaagacactggagaatgcccagcgtttgcgcaattatactgaactgaagccaggggattatgttgttcatgttaaccacgggattggtcggtttgaaggaatcaagactttagaaaataatggtaccaagcgtgactatattacgattacctaccagcatggtgatcagctttttgtaccagcagatcaattaagcttagtacaaaaatacgttggttcagaaggtaagacaccacatattaataagctaggtggtagtgagtgggctaaaaccaagcgtaaggttcaatctaaagttgaagatattgcggatgatttgattgaactttatgccaaacgtgaatcagaaaaaggctttgctttttcacctgatgatgatctacaaaaacaatttgaagatgcctttccttatccagaaacacctgatcaattgcgatcggttaaagaaattaagcaagatatggaaagctcgaagccaatggaccgtcttttagtaggggatgttggttttggaaaaactgaggtagccttacgagcagcttttaaggcaattcaggataataaacaagtagcctttttagtacccaccactattttggcgcaacaacactatgagacgattcaagatcgcttcaaagatttcccagtcaatactactatgctatctcgttttcaaacgccagttgaatcaaaggaaattattgaagggctaaaaaatggcaagatagatttggttgttgggactcaccgtattttgtctcaagatgtaaaattcaagaatctaggattgttaattgttgacgaggagcagcggtttggcgttaagcacaaggaaaagttaaagcagttgaaggcaaatattgatgttttgacattaacagctacgccaataccgcgaacgcttcatatgtcaatggtaggtgtgcgtgatctctcagtaatggaaacgccacctcaaaacagataccctattcaaacttatgtgatggaacaaattcctagtgtagtaagggatgcatgcttgcgtgaaatgcaacgtgatggacaggtcttttatttacataatcggattagtgatatcgatgaaactgtcgaaaaactgcaggaattgatgccacaggcgcgaattgcagctgcccatggtcgaatgagtcagaatcagttggaagatattctttatcgcttcctgaatcgcgagtttgatatcttggttacgactacgattattgaaacaggaattgatatgcccaatgtcaatacaatgatcattgaagatgctgaccactatggtctaagtcagttgtatcaattgcggggtagaattggccgtagtgctcgtttggcttatgcttacttcttgtataagccaaataaagttttaactgaggttggtgaaaaacggcttgatgcgatccgtgacttcactgaactgggttctggtttcaaaatagcaatgcgtgacttatcaattcgtggtgctggaaatatgctgggtgcacaacagcatggctttattgatagcgttggttatgatttgtactcacaaatgctggctgatgcaattcaagaccgtaaggggaagacaacaatcaaaaagtcaaacgcagaaatcgaccttggacttgaggcttatattccagattcgtatatcggtgatcaagaagaaaaaattgaattttacaaaaagattaaagccgtctcaagtcaggaagaattaggtaaaattgaagatgaattaatcgatcgttttggtgactatccaacggccgtcgagaatttattagctgttgccggtctaaaggttgatgctgacatggctcaagtgctcaatgtggttaaaactgacgataagattaaagtggaatttacgaatgcagcttcacgcgaacttgagggacctaatatttttaaggcattggagcatgtaagcttaaaggctcgcattagtatgaatcaagaaaaaagaatggttgtcttgctattgttgccggataaaatgaagaatcgtgttttattcaatgaactggcaatctttttacaggcagcaagcgacattgtacaaaggtaactgtaggagaaaaatatgaggattgataaatttttaaaagtttcacgattagttaagagaagaaccgtagctaaagaaatggctgatcaaggtagaatcaaagtcaatggtcgagttgtaaaatcaagctacgatgtaaaaattgatgatattattgaagtaggttacggcgccaaaaccatcaaggctaaggtgttaaatattcgcgagaccacgaaaaaagcagaagcaagtgaactgtacgagctagttgattaatgacttttgattaaatcgttgttatacttgacttagtatagttatttagtaattaggggattaaacaatgaatcatggtccacgtatatataattcgttgagtccagaagagcagagggcgcgtcttagacgtaaacaggctaaattagagaaagaaacacaccgcaagcggttgaacgtaattatggcagtttttgctatcattttcgttgctttaggtgtacagattgcaatcaagatttctcaaactggacgactgaataatcaagtacaagctgaaaaacagactttaactaaagtaaaaaataagagaaatgacttagaaactgaaaagcaggatttgaaggatccaaattatgttgctaagctgattcgttataaattctattattctaaatcaaatgagaagatttataacgtgcatgaaagaaatgatgataactaatggaaaagtatcaagctggtaatcgggtgactggtgtaattaataacattactgacttgggcatctttgttactttacctaatcggcattctggtttggttcatcatagtgactttggcaataattggctacgcgaacgtcgtcgttatcatgctggcgatgaagtgcgcgtggttgtggtgcacatccataaagggagatttaatttatcgatcactcgagtgaatgatccggaattagttgaccatgataatcaattttctaagacaaagccagctgattttgatcaagtcctgaatcaaacaacgcgggatgctaaagaagaaattgaaaagctaaagcaagtattaactgagaattaagagatggtccgaaagggccattttttgttagaaaaataatgaaaattaatgatttttttgaacaacatcagattgacttaaaggataaaagactattagtagccgcaagtgcgggaccggattccatggctttactagatatgctagttaatttgcaaaaacaactaagttttactgtttttgcggcacattttgatcatcaattgcgtgcggatagctcatatgaagtagaagttttgcaaaattattgtgctcaaaagaagatttgcctgtttaatggcaagtgggataaacatgatcagccccaaacgggaattgaggcagcggcgcgagaggcacgatatcattttttgactaatgttgctcatagcgagcgaatgaactatttattaactgcgcatcatggtgatgatttgctagaaaatattttgctcaaatttattcgctcgggaaatcctgaagagatgaatagtttgcaagatatcggctctatgcatggcgttgttttgcttagaccactattagcctatagtaagcaagaattactcgaatatgatcaagagcgtgaaattgactatgtaatagattcaactaatacggaggatgagactgttcgaaatcgactgcgtcatcatgtggtgccattattaaaagaggagaatcctaatttaattagtaatgcactgcgttttagtgaaaaaatgagtcaattgacggatttggcggatgagcagttgaatagtatgagaacggttgagccatttttgggtgcttggcgaattaaaacggacaacttaaatgatttatctacagaagaaaaaaatattttttggcaaaagataatctggcaaaaatatcatcgccgggtaaatgaaaatttgggcaattttgaggtgattgattatcaaggttatagttatttagttgaaaataagccacagaaaattgtgcagccatttagtatcgaactaaatcagcaatttgaattcaacggagcttattatttactaactactgataggcaagctgatttgaaagaaataggaagcttttggctggaaagggatgcacattttactgcgggaagtctagtacctgctagcaaattattgttgaaaaatggtcaacgagttaaggcgaaaaagaaatttgcagaaaaggcaattccctttgccttgcgctcttgctgcattacaatttatgctgaaaatgaacctgtttttgtagaaaaatgttatcaaaaacaggactttatcacagatggtaaacattatttcctatacatttattaagaagtcttcaaaataggtgaaaatgttagtggttgcaagctaatttgtgatagaattttaaacgtataacttaaagactttgcggaggttttttatgaagaataaccggaatcggctactttcaaacggccttttctatatagttgtgttccttctgctcctatggggaatcaactgggcactcggcggctctaacaatagtggtagctcagagaatatcagttactcacaatttgttaaagatttgcgtcaaggcaaagttaaaaactttagtgttcaacctgctaatggtgtttacactgtttcaggtagttacaagactgcacaaacaacaaagaatcaatcaaataatagttttgatttctttagtaataattcaagtagaaaagtttcgcgcttctctactaccatgttacagaatgattctaccgtttctaacgtgcaaaacttggcacaaaaaagtaatgctcggatgacaactcaaggagaatcacaatctggcaattggatttcgaccattgtcatgcttgtgccaaccgttttgtttatcgtcatgctttggatgatgatgaaccaaggtggcgctggacgtggtggtggcggcggaataatgaatttcggtcgttcacacgtcaagccagaagatccttctaagaataaggttcgtttctctgacgtagccggtgaagaagaagaaaaacaagaattagtcgaagtagttgaatttttgaaagatccatctaagtacactaagttgggtgcaagaatcccatctggtgttttacttgagggtcctcccggtactggtaagactttgcttgctcgtgctgtagctggtgaagctaacgtgccattttattcaatctcaggttcagacttcgttgaaatgtttgtcggtgttggtgctagtcgtgtacgtgacctgtttaacaatgccaagaaaaatgcaccaagtattatctttatcgatgaaattgatgccattggtcgtcgtcgtggcaatggcaccggcggtggtaatgatgaacgtgaacagactttgaaccaattattggttgaaatggatggttttgaaggcgatgaaggtgttattgtcattgctgctactaaccgttcagacgtcttagacccagctttgcttcgtcctggtcgttttgaccgtaaggtattggtaggtcgtcctgacgttcgtggtcgtgaagctattttaaaggttcacgctaagaacaagccacttgcacctgatgttgatttgaaggaagttgcccgtcaaactcctggctttgtaggtgcagatttggctaacgtcttgaatgaagccgcattagttgctgctcgtcgtaatggtactgagattactgcatcagatattgatgaagccgaagaccgtgtgattgccggtccagctaagaaggatcgtttgatttctgaaaaagaaagaagacgtgttgctttccacgaagctggtcactcaatctgtggtttggtcttaagcgactcacgtactgtacgtaaagttactatcgtacctcgtggccgtgctggtggttataacatcatgttgcctaaagatgatcaattcattttgactaaaaagcaattatttgaacaaattgttggtttgatgggtggtcgtgcaggtgaagaagcaaccattggtgataagtcaactggtgcttctaacgactttgaacaagctactcaaattgcgcatagcatggtagttaactatggtatgaccgaatccttaggtatggttgagcttgaaaaggaaggcgaaagcaatccttacggctttaagccatatagtgaagcaacttcagctaaaattgatgaagctgtaaagaagattttggatgaagctcatgctaaggcccttgagatcgttaaggacaacaaagaaaagcatagaatcattgccgaagctttgctcaagtatgaaaccttgaatgaaaagcaaattatggccttgtataagaccggtaagatgcctgaaaaagacgaagatgaatatccgagtgaatcaaaggcttcaacttatgaagaagctaaggctgctgcagagaagcgcgaagttgaaaaggcagaaaaaaaggattcagatcaagcattagctgatcaagaaaaagataccttggagactccatctgaaaagaatcatgaagttgaagaaaataatcctgagaatcccgaaaaggatcaatcagaaaatgaaacttcaactcaagatactcctgcagatgatgagcataaagacaattaaataaaagtagggcctgtcacaggctctatttttttagaaaagaaggataaaaatgagtgattatttagtaaagtcaattgataagactaaaaacttacgcttgttaaccattaccgctaagggtgtagtgagtgaagcacaaaagcggcatgacttgtggtcagcttcagctgctgtgcttggtcgtactttagtaggatctcttttacttgctggtgcagaattgacagataaggaagaattgacagtccgtttattaggcaatggccctgttggtccaaccatcgtgacagctacctccgatttgaaggtaaagggttatgttaagaatccacatattgctttaccacctaagaaaaatggtcatattgatgtgaaaaaggctgttggacaaggatggtttgaagtaactaaggaccttggcttgaaggaaccatacacaggtcaggtaccaattgtttctggtgaaattgctgaagattttgcttactatttgactaagtcagaacaaattccgtcagctgttggtttgtcagtatttgttaatccaaataattcaatcggtgaagctggtggctttatgttgcaagcacttcctggtgctagtgatgctttgatcgatgaaacgattaagcgaattgatgcattgccagcactctcaacttcatttttggatggaatgacaccagaagacttagcacgtaaaatcttaggaaccgattgtaagattcttgaaaaagatgatgtagcctttaactgtgattgttctaaagaaaagtatgctggtattttggaaactttgaagagcgatcaattgaaagcaatgattaatgaagatcatggtgccgaacttacttgcaatttctgcggtaacaagtatcattattcagaagatgaattgaaagatattttagctaaaaagaacaaagataaagattattaaggccctgaattgtcaaattaagtgcaacagttaggttatgaagagatatattgcttgaagagttcctctgctgtgtgatattggaggattcggcgatatttgtggttaatggcatcagttgcctgttgaacataagcttttgacttgtctttcatgctcttgcccttagggaagaattgacgcaaaagaccattgcagttctcattggtgcccctttcccatggagaatatgggtgagcaaagtaaatctggcagcccttgatcttggtcatatccgcaaactcagagccattgtcaaacgtgattgatttaaaccaggcaggatgtctgtcaatctccttttgaagcagcctttggcatgtgcttgcccgatagtcaggaatcttgataactacttcaaagcgtgtggttctttcagtcaaagtcattaaagcaggctgattcttgcgtctgacgcctttaaccagatctccttcccagtgcagcggagcttttctgtcttcaatctctttaggacgctgttcaatggaattgccaagatgcttcttgtgcaaagcgtgaccgccatggctgtgatgacgcttgttcctgcgtcttttgagcttcataggcagatcaatattgcttatgtccagcaagccctgatcaatatagcgatagacggttggtgtgctgggacaagggtagcctggcatagtccttttgaattcaccaacgaactcatcgatgctggtggcatcaaatttagctttaaagcgtctggagagcattctcaaaaagacagcataatgcttcaatggattgcgctgatagcagtttttgcgacgcttctcataataaatctgtgcagtatcagcgtaatagtgctcatacaataaatagctgctgtctctttgcaggacacttccgcgtttgatttcgcgactgattgtcgacttatggcagccgacttcttgagcgataacagtacgggaagttatgccggaatccagcattgcttgaatttgtccacgttgtacgctggttaattgatgatagtgcttagaaatgctagaatttgaattggtcataaagatcttcctttcttgatttttcgtcacttcaagtttaggtcttcatggcctttttgtttaacacttagtgttgcacttcaattttaaatccgggaagattattaaggcaaataaagccctaaggttttaaccagcggggcttttttgatatcataatagggtaattttgaaaggatgatttggtgaataacagctggaaaattcgcgatatcaccattccaaaccgagttgttgttgcgccgatggcgggagtttcaaactctgcattccgcgttgtctgtaaggaattcggagcggggctggttgtctgcgaaatgatttctgatcatgggatcatttatggaaataaaaagacattaagtatgatggatgttgatccgcgtgaacacccaatgagcattcaaatctttggcggaagcgaggaaactttgcttcaagctgctcaatatattgatcaacataccgatgcggatattattgatattaatatgggttgtcctgtacctaaagtaacaaagactgatgcaggttcgaagtggctacttgattcaaacaagatttatcagatggttcacgcagtagtgcagaacgttaaaaagccggtttctgttaaaatgagaacaggctgggataaaaagcatatttttgctgtagaaaatgctttagctgctcaagaagcaggcgcaagcatgattgcgatgcatggtagaacacgtaaacaaatgtatcaaggtgaagctgactgggaagtattacatgatgttgcccaggtgctagatgtgccttttgtggctaatggtgatattagaacacccgaattagctaaaaaagcattggatgagatcggttgtactgcagtaatggttggtcgcgctgctttaggtaacccttggattttgaaagatatggtacactatctggaaactggtgaaaaattgaagccgcaaactgttcgtgagaaggttgaaacggctaaacatcagcttcacgcacttgttaaaattcacggtgaaaagcgtgctgtaccagaatttcgtcagcaagccgcgtattatttaaagggaattccccgttcagcccgtactcgtgctaaaataaatgaggtctggacgcgtcaagaagtatatgatttgcttgataattttgttgacgagtatgaaaaaagagaagaagctcgtgctgcacgacgcgcgacaatgaacaaataaatggaggaaaagtaaattggcaaagaatgaaatgaatgaccaattaatagttcgtcgccagaagatggaagaattacgtgaaaacggaattgaaccatttggtcaaagaaaatttgatcgtcaagatttggcaagtactttagaagaaaagtatggcaacgaagataaagaagaattaaacgctgatatgcctaagaccaagattgcaggtcgtatgcttgcaaagcgtggtaagggtaaggttggttttgctgatctttacgaccgtactggtaagattcaaatctatgtacgtaaggatattgttggcgaagataactacaagatctttaagaaatctgatattggtgatttcttaggtattgagggtgaagttatgaagactgatactggagagcttactattagagcccttcacgtaactttcttatcaaaggctcttcgtccattaccagataagtaccatggtttaaaggacgttgaggcaatttatcgtcaacgttaccttgatttgattaccaaccatgatagttacatgcgttttgttcaccgtacccaaatcattcaagctattcgtgactacttaaatggtcaaaacttcttggaggttgaaactccagtacttcacaacattcctggtggtgctgaagctcgtccatttattactcaccacaacgctttggatattaacctttacatgagaattgctttggaacttccacttaagcgtttgattgttggtgatatggaacgtgtttacgaaatcggccgtgtattcagaaacgaaggtttggacactcaccacaacccagaatttactgaacttgaaagttacgcagcatactgggactaccatgatgttatggatgaagctgaaggtattatccgtgctgcagctaaggttgtttcagatgacggtaagatcacttaccaaggtactgacattgacttaggcaagccattccgtcgcgttcacatggttgacttgatcaaggaaaagactggcgttgacttctggaagccaatgactcttgaagaagcaactaagattgcggaagaccacgacatccacgttgaaaagttctggaaagttggtcacattattaacgccttctttgaaaagtactgtgaagaaactattgttgacccaaccttcgtttacggtcacccagtagaaatctcaccacttgctaagaagaatgctgacgatccaagatttactgatcgtttcgaaatttacatcatgggtgaagaatacggtaacgccttctcagaattgaacgatcctgacgaccaacgtgaacgtttcgaagctcaaatggaagaacgtgaagcaggtaacgacgaagctgacatgatcgatgaagattaccttcgtgctatggaatacggtatgccacctacaggtggtttgggtatcggtattgaccgtttggtaatgcttttgactgatgctccagctattcgtgatgttcttttgttcccaacaatgcgtccagaacgtgttgaaagcgtagaagctgaagttaaggctgatatggaaaagaagaataaagaaaataagtaatcttataaattaaaaaactcttatctatgttttaagcattgtactgagacgtaaaaagtagacaattaaaatattggattaatagaggcttgacttcgatactctttcggggttaagccttttaatctgctctttatcctttcgttgttatagtattcgatatattcctcgattgcttgagttaattcttgaagattatgatacttgtattcttgatcatagaacatttcagttttgagcaggccaaagaagttctccattagcccatcatccatggagttgccctttctggacatgctttgagtaataccatggagttttaaagctcgctgataacgagggctttgatactgacagccctgatcagtatcaaaaatgcagttattaagagctgtttctttggcaaaagccttgtcaagcattgtcattactaaatctatatctggatgtttggagatagtataagaaactatatcgccaccgcagccgtctagaataggcgataagtaaagcttttcattattaagatgaaattcagtgatatcagtataccattttgtgttaggcagggctgcgaagaaatcacgatgaattaaatttggagctattttgccaatagtacctttatagcttgaatatttgcgcttattgcgcctgatgcctttaagacctaatttatgcatccaatagcgaacggttttctccgtaactttccagccctctctgattaactgcaaagctactctgcgatatccatagcggccttgatgatgattaaaaatctcatggattctagcaataagctttgaccgtttaggcttggcgggctgtcgtttgataatcttgtagtatgagcttctggcaattataggtagctcagggtgctctgcaatcgcagctaatacataatttaaactaactttgaattcttgccttagatccgtaatcaccctagctatttcttctgatcttcttggtccaaggcacttagtttttttacgtattcgttcacaatacgcaatcgcaagttttcttctttcagctgctggatctctttctccagttccttgcgagatttctgcttttctttggtcacgggcagggcgtcctttctgtttgataatgacattatacccgtttttcttatattctctaatccaattgttaagcatgccaatacttttaaaccccagttccaaagacagctgtaagtatggtttattgccaaagattgcttgttcaatagttcgctgcttaaactctttggaatagctttggtttttagtagttaaaatttctattccatgcatatcaattaatctaagcatatagtctaaattagctagattcattctgtacgctttagccaattgactgattgagatattttcatctttccatttatgataaatttctattttttgttctttattaaatttagacatagtaaacattctaagctaaatagtgaattagttatccgacgggataattgattcactatttttattcttttgtagaattaaagtagtggtaaaacgatatgccctgaggtctttagacacttgatgtcgcataataaactggcagttttacttaagttttcaatagtctcttcgaagaatgtggacactagatgtcgagtttagaaaattagatctgatttcttaagtaaatacgttttactactaagttttggaggtttttattatgcaagttacttttggaattgatgtaagcaagtctacttctactgtttgtgaactaattggtgaaagcaaaaatgaactaaccattactaataatcgtcctggttttattcaattgcttcatgaattaaccgctttttctaaacatccgcaaattatttttgaagctaccggtgtttattcacgcagactgcaggcttttcttgaagactacggctatgaatatgttgttattaatccgcttaaagccaaaaaagagatgaatatggggctacgctacaacaagaccgataaaactgatgcttatcatttagctttaattcaaagactttatcgccatccggttaatcaaagcgaatcccaaacttataagcagcttaatgctttgagccgcttctatgaccagctgacaagtgacttggtaatagctaaaaatcgacttcaccaagctctacaatcgacttttcctgaaattgaaaatttattttcttctgctagaggtaaaaattactggcaaatagttgtgcgatatcctcattgtgacttagtaagaagagaagataaaaaacagcttattaactggttaatgagcttaaaggggattgcttttaaacacgctctaaggactgcagataaattaattgaattagcttatcaagcttatccagttgtatcttgctctagcatagaagtcgagcaagtgcagtattatgcacacagattgcttaatttaagtgatcaaagagaaaatttaatcgcaagaatggttaagttagcgaagtctttgcctaatcatgatttagaaaacctagaaagcattccaggctttgcacagaccactgctgtcagagttttagcagagttaggagatttacgcagatttagtaatcctaataaaatcaatgcttttatcggaattgatccaggcagatatcagtcaggagaaatggactctaatttaagtattactaaacatggcaatgcagtcgcacgtaagttgctttatcgagctattggacaaattgataatgcagctaagacaaatccgtgtcatatagcagattattatgaaagcaaaaagctatcctctcaaaccaaagggttcaaaaagatagctattgcttcaattcataaactaatcagaaccatttatgccctgattatcaatgatcaaccatatgattacaacgtagccacacataatcaaaaagactttagtcgtaattaattgatcaagtacattataacgctaagcccaaaaatcagatatggatctgggcttatttgtcgtgtctaactaaaaaaataaatcgacactaaaagatgtttaagttgaaatttaaacaaaaaatgaagtcaaacttcttattatgcttgactttacgtagaaaaagacctaaaagtgtctaacttttaggtctcagttcacatggataagagtttgtgtttatatattttttaattgagaatcattttttcatcagagtattttttaggatcatttaaatcccattgctgatatctaacttcttgacacttaaagcctaattttttgtaaagctttttggccttagtattttctgcaaatacatcaagactaactggtcgactcatgtatctcaaagctgtcgttgctaaagcatacccgatacctttattttgatgaattggatctacataaatgtaatccagttcttggggatgaactgcaacgaagcccaatatgctgtcagcatcataagctacataaattttgcaggagaaaaaatcatccttatatggagctgtctctaaaggtatgaagtatttttccgcaccaccaattgttagctcttctttacgactaacgtcgtgaatgcgacatacttcagcataatcgtttggttgatattctctgatattaaattttggcatgtttttctcgcttcctaatattaagattttgatttagaaagcaatagtacgtaatctcatgtgaaatctcctttaattaaattgaagatattatagcaatttttttaattcggtacaataactaaaattaacttagttaaaaacagataagtaatattttttccccggatttaaaattgaagtgcaacactaagtgttaaacaaaaaggccatgaagacctaaacttgaagtgacgaaaaatcaagaaaggaagatctttatgaccaattcaaattctagcatttctaagcactatcatcaattaaccagcgtacaacgtggacaaattcaagcaatgctggattccggcataacttcccgtactgttatcgctcaagaagtcggctgccataagtcgacaatcagtcgcgaaatcaaacgcggaagtgtcctgcaaagagacagcagctatttattgtatgagcactattacgctgatactgcacagatttattatgagaagcgtcgcaaaaactgctatcagcgcaatccattgaagcattatgctgtctttttgagaatgctctccagacgctttaaagctaaatttgatgccaccagcatcgatgagttcgttggtgaattcaaaaggactatgccaggctacccttgtcccagcacaccaaccgtctatcgctatattgatcagggcttgctggacataagcaatattgatctgcctatgaagctcaaaagacgcaggaacaagcgtcatcacagccatggcggtcacgctttgcacaagaagcatcttggcaattccattgaacagcgtcctaaagagattgaagacagaaaagctccgctgcactgggaaggagatctggttaaaggcgtcagacgcaagaatcagcctgctttaatgactttgactgaaagaaccacacgctttgaagtagttatcaagattcctgactatcgggcaagcacatgccaaaggctgcttcaaaaggagattgacagacatcctgcctggtttaaatcaatcacgtttgacaatggctctgagtttgcggatatgaccaagatcaagggctgccagatttactttgctcacccatattctccatgggaaaggggcaccaatgagaactgcaatggtcttttgcgtcaattcttccctaagggcaagagcatgaaagacaagtcaaaagcttatgttcaacaggcaactgatgccattaaccacaaatatcgccgaatcctccaatatcacacagcagaggaactcttcaagcaatatatctcttcataacctaactgttgcacttaatttgacaattcagggtaatattttttcaaaaagtatttgcaaagagaataatctttgctataataatttttgtatcgcggaagtagttcagtggtagaacatcaccttgccatggtgggggtcgcgggttcgaatcccgtcttccgctccaagatgaagagctcacgaatgtgagctttttttgtgcctaaaataaatttatcttttttgataaaaaggtcttgcaaagaaaaatgtatttgctataataatatctgttgtcgcggaagtagttcagtggtagaacatcaccttgccatggtgggggtcgcgggttcgaatcccgtcttccgctccaagatgaagagctcacgaatgtgagctttttttgtgcctaaaataaatttatcttttttgataaaaaggtcttgcaaagaaaaatgtatttgctataataatatctgttgttgcggaagtagttcagtggtagaacatcaccttgccatggtgggggtcgcgggttcgaatcccgtcttccgctccaagatagaaggctcaccaagtggtgagtctttttttacgggaaatagctcagtttggtagagcgctacgttcgggacgtagaggtcgccggttcaagtccgattttcccgatatacaagctatccgtttgggtagcttttttctttttgttataatatcttttaaaacttaaagggagattaaaaatgacggcaactactgaagaaaaatacaaattattagtggagcaagctagagctttgattgagggagaagatgattggattgctaatacagctaatttatctgctcttttgtttaattcgttaaatgatgtgaattttgcaggtgtttatcgctatgaaaatgatgaactgatattaggtccatttcaggggatgccagcatgtgttcatattcaaatgggaaaaggtgtttgtggtacggctgcacaagcaaaaacaacgcagattgttaaggatgtacatgaatttgctggtcacattgcttgtgatagtgcttcaaattcggaaatcgttgtcccaatttttaatcagggaaaactttggggcgtctttgattttgattcgaccaagctagctaattttgacgaaattgataaaaagtatttaactgaaatagcgaaagcaatttttgcgtaattattagaattggacataatgaagttgaagataagtcaaattgttttacttactgacaaaagaaaagtaaaataccataacgtattttaaagggtggtgtttgtatggaaaattcatatagtaagagcgttaatcaagtattgaaaattgcacgtgaacaagcacaaaattttcatcatcgcttgattggcacagaacatgttttattggctctagtaattgaaactgacggtgaagcaggaaaaatcttgcgttcatggggattaacaccaactgcagtacgtgaagaaattgaacgttatacaggttatggctctgcccctaaggcaagctacatggaaatgtcaccacgtttgagtttagctttggattatgctagaagacgagctaatgacgatggagttaaggaagttaacactaatcatgttttgctgggaattactgcaagtgagcaggttttatcagcaatgattttgaaaaacttgaatgttgatattcctcgtctgcagcaggatgttgaagacagtttgagtcaagaccaagactttggtgattcagctaattggctgggtgatgataacacgacgactggtcaaaagaagcgcaagagcactactcctaacttagataaggtagcggttaatttaaatcaacgtgtgcgtaatggcgagattgatccggtgattggccgtgaccaagaaattaagcgtgtgattcaaattttgtctcgacggactaagaataatcctgtcttagttggtgaaccaggagttggtaagactgctgttgctgaagcgattgcaactgagattgtcaacaaaaaagtgccacaggatatgcttaagaaacgggtaatggccttaaatttaggtagtttagttgctgggactaagtatcgtggtgagtttgaagacagaatgaagaaaatcctgaacgaagtcaccaaggatggcaatgtcattctctttgttgatgaaatgcatactttaattggtgctggtggtgctgaaggtgcaattgatgcttctaatatcttgaagccttcgcttgctcgtggcgatattcaaatgattggtgcaactacttttaatgaatatcaaaagtacattgaaaaagatcaagctttggcacgtcgttttcaacaagtgcgcttaagtgagccttcaagagatgacactttgacaattatgcgtggcttgaagtcgaaatatgaaaagttccatcatgtgactatttctgatgagagcttgaaggatgcagttgatttgtcaacgcgctatatttcggatcgctttttgccagataaggcgattgacttagtagatgaagctagtgccgcagttaagattcgtaataacattagcaatgatgctgagctagaaaaagttaatgagcaaattaagaaactgattacgcaaaagaatatggctgccgctagtcaaaactttgttaaagctgctcaattgcaggatgagcagaacaacttagaaatgcaacgtgaagcaatggtagagaagttagaagacaaagttagtgctaaagctgtggttgagccagaagatatcgctaaagtagtttccaactggactggcgtccctgttacccagatggaacgcaatgaatcacggcagctagctaacctggaaaagattttacaccaacgtgttattgggcaagataaggctgtttcagcagttgcccgtgctattcgtcgtagtagaagcgggattaaagatgaacgtcgtccgattggttccttcttgttcctaggtccaactggtgttggtaagacagaactagctaagtcagttgcagcagcaatgtttggctcggaagacaatttgattaggctagatatgtctgaatatatggaccaaattgcttcaagcaaattaattggctcggcaccaggctatgtcggttatgaagaaggcggtcaattatctgaaaaggttcgtcgtcatccgtactcggttattttgcttgacgaagtagaaaaagctcatccagatgtctttaacttgcttttgcaggttttagatgaaggatttttgactgactccaaaggtagaaaagtcgactttagaaatacaattataatcatgacttctaatttaggttctcgttcgctctttgataataaggcagtcggcttcaatgcagataatgcagatccagccaaggcgagatcagctaaagttgaacaagcaatcaaacaattcttccgcccagaatttttaaacagaatcgatgaaactattatcttcgatgaactagataagaagcagctgcgcaatattgtaactttgttaacgcacaagctggtagttcgtttgcaaaagaagggtatcgaattgaagctatcacgggcagcactggatcagattgcacaagatggttatgatccagaaaatggtgctcgaccattgagaagagcaattcaaaatgatattgaagacaagattgccgagatgctgattgtaggcgaagttaagtcaggcgacactttgaaaattggtagtcagcatggacatttaaaatttgaagtagttaatccgaaaaaagaaactgtaaaagtcaagtgatattggtgctataccttgacaaaatgctgaaaatatcatataatttttgctgatttaaaaagactgagattcaggattttgctgatctattgtccagcaaaatgataagggacaaaaacgacaattgttgtttttgtcttttttatgcctaaaattgcagttttttgaatttgtaacagaaatgtaatatttgctttcttagacagaaaggatgtttttccttgttaaatggacacgtagtgaactacggtaaacatcgaactagacgtagcttctcccgcattaaagaagtattgaagctgcctaacttaactgatgttcaaaccgaatcatataagtggtttcttgataaaggcattaaagaagtctttgacgacattatgccgattagcgatttctcaggtaagctttcattagaatatgttggctataaattgcaaaagccaaagtatacagttgatgaagcccgtaaccatgatgcaacttatgctgcaccaatgcacgttaccttgaaattgactaaccaagaaactggtgaaattaagactcaagatgttttctttggtgatttgccattaatgaccgaatcaggttcatttattgttaacggtgctgaaagagttatcgtttcacaattggtaagatcacctggtgtatattacactggcgattatgacaagaatggtcgtcaaatctttggtactactgttattcctaaccgtggtgcttggcttgaatatgaaaccgacgcaaagaacgtttcatttgttcgtgtagaccgtactcgtaaattgcctcttactgtattgattagagcaatgggtattggctctgacagtgacattattgatatgtttggtcaaagtgatactttgcaattcactttggacaaggatgttcataagaacccagctgactcacgtgtagctgaagccttaaaagatatctatgaaagacttcgtccaggtgaaccaaagactactgattcttcacgttcacttttgtatgcccgtttctttgatccacgtcgttacgatttagcacctgtaggtcgttacaagatcaataagaagctttcacttaagaaccgtttatacggtcaaactttagctgaaactttagctgatccagatactggggaaattgttgctaagaagggtactgtagttacccacgaagtaatggataagttagctccataccttgatcgtgatgactttaagatggtaacttaccaaccttcaaaggaaggcgtattaccagatcctattgcagttcaagaaattaaggtttactcaaaggtagaccctgaacgtgaagttaaattaatgtcaaatggtcatattgctgataacgttaagcatttgactccagctgatgttttagcttcaatcaattacttctttgcattgcaagatgaaattggtactactgatgatattgaccacttgggtaaccgtcgtattcgtcgtgttggtgaacttcttcaaaaccaatttagaattggtttggcacgtatggaacgtgttgttcgtgaaagaatgtcaatccaagatccttcaacagttactccacaacaattgatcaacattcgtccaattgttgcaagtattaaggaattctttggttcatcacaactttcacagtttatggatcaacataacccattaggtgaattgactcataaacgtcgtatgtcagccttagggcctggtggtttgacccgtgaccgtgctggttatgaagttcgtgacgttcactatactcactatggtcgtttgtgtcctatcgaaactccagaaggtcctaacattgggttgatcaactcacttgcttcatatgcgattattaataagtatggttttatcgaaaccccataccgtcgtgtttcttggaaggaccacaaggttactgataagatcgactatttgactgctgacgaagaagataattacattatcgctggtgccaacactccattgaatgatgatggttcatttaaggagaagttgatcttggctcgtcaaaaggaagataacgtcgaagtttctccagataagattgactacatggacgttattcctaagcaagttgtttctgtcgcttcagcatgtattccattccttgaaaacgatgactctaaccgtgctttgatgggtgccaaccagcaacgtcaggctgcaccattaattaatccgcatggttcacttgttggtactggtatggaataccgtgctgcacacgattcaggtgctgctttaatcgctaaggctgctggtgtagttgaatacgttgatgctaatgaaatccgtattagacgtgaagatggtactttggacaaatacacacttgaaaagtaccgtcgttcaaataactctaagtcatacaaccaaactcctaatgttaaattaggtgatcatgttgacaagagtgatgtaattgctaacggtccaactatggatcatggcgaacttgctttaggtcaaaacccattgattgccttcatgacttggaacatgtacaactatgaagatgccatcatgctttctgaacgattagttaaggatgatgtttatacttcaatcagtattgaagattatgaatcagaagctcgtgacactaagttaggtccagaagaaattactagagaacttcctaatattggtgaggatgctttgaaggatcttgatgctgatggtatcgttcgtgttggtgcagaagtccacgatggcgacattttggtaggtaaggtaactcctaagggtgtaactgaattatctgctgaagaaagattacttcacgctattttcggtgaaaaagctcgtgaagttcgtgatacttcacttcgtgtaccacacggtggtggcggtattgttcaagacgttaaggtttatactcgtgaagccggcgatgaactttcaccaggtgttaacacaatggttcgtgtttacatcgctcaaaagagaaagattcaagttggggacaagatgtctggtcgtcacggtaacaagggtactgttgctgcagttgttccagaagaagacatgccatacttaccagatggtactccagtagatatttgtttaaacccaatgggtgttccatcacgtatgaacatcggacagcttcttgaattgcacttaggtgcagctgctcgtcaattgggcattcacgttgcaacaccagtatttgatggtgctgacgaaaatgacgtttgggacacagttcgtcaagcaggtgttgataaagatggtaagaccgttgtttatgatggtcgtaccggtgaaccattccacaaccgtgtatctgtaggtgttatgcactacttgaagttgacccacatggttgacgacaagatccacgcacgttcaattgggccttactcattggttactcaacaaccacttggtggtaaagcacaatttggtggtcagcgttttggtgaaatggaagtttgggcccttgaagcttatggtgctgcttacacattgcaagagattttgacttacaagtcagatgacgttgttggtcgtgtaaaggcatatgaagctattgttaagggtgaaaagattcctaagccaggtgttccagaatcattccgtgttcttgttaaggaacttcaatcattaggtttggatatccgtgttcttgatatgaaccataatgaaattgaacttcgtgatatggatgaagactcaagtgaacacttgaacatcgatactttgtcacggatggcagaagagcaagaaaagaagaagttagccgaagaaactggaaaatcagaagataaagacagtaaagaaaatgcagataagccggtagctcctgcagatgagtctgacgataaagtttctaaatagtaggaggttaaacttttgatcgacgtaaataagtttgaaagtatgcaaattggtcttgcatcacctaacaagatcagaagctggtcatatggtgaagttaaaaagccggagaccatcaactaccgtactttaaagcctgaaaaagatggcttatttgatgagagaatttttggaccaacaaaagattggtcatgtgcttgtggtaagtacaagggcgttagataccgtggtatcgtttgtgaccgttgtggtgttgaagttacttcttcaaaggtaagaagagaacgtatgggtcatattgaattggctgcacctgtaactcacatttggtactttaagggtatcccatcaagaatgggattagttttggacatttctccaagattacttgaagaagttatttactttgctgcatacattgtaattgatccaggtgatactgaccttgaacctaagcaattattaactgaagctgaataccgtgaacaaaaagctaagtacggtaaccgttttgaagctaagatgggtgctgaagctgttcgcgaattgcttaagaaagttgaccttgataaagaagttaaggatttgaagaaagaacttcaaactgccactggtcaaaaacgtacgcgtgcaattagacggttagatatcttggatgccttcaagaattcaggtaacaagcctgaatggatggtaatggatgccgttccagtaattccaccagatcttcgtccaatggttcaacttgaaggtggccgttttgcaacttcagatttgaacgatttgtacagacgtgtaatcaaccgtaacaaccgtttgaagagattgcttgatttgaacgcacctaatattattgttcaaaacgaaaagcgtatgcttcaagaagctgttgatgctttaattgataacggtcgtcgtggtcgtccagttgttggaccaggtaaccgtccattgaagtcactttcacatatgcttaaggggaagcaaggacgtttccgtcaaaacttgcttggtaagcgtgttgactactctggtcgttcagttatcgatgtttcaccaaaattgaagttctatcaatgtggtgtgccacgtccaatggctttggaattgttcaagccatttgtaatgcatgaattagttaaacgtggaattgcatcaaacatcaagaatgctaagcgtaagattgaccgtgaagatgacgatatctgggatgtacttgaagatgtgattaaggaacgtccagttcttttaaaccgtgcacctactcttcaccgtttgagtattcaagcctttgagccaatcttggtaccaggtaagtcaattagacttcacccattagcttgtgaagcctacaatgccgacttcgatggtgaccagatggctattcacgtaccactttctgatgaagctgttgctgaatcaagattgttaatgttggctgctcaccacattttggctcctaaggatggtaagccaattgttactccatcacaggatatcgttttgggtaactactggttaactcaggccgaacgtggtcgtgaaggtgaaggtatgatcttcagctcaccagcagaagctgctgtagcttacgaaaatggcgatattcactaccataccattattggtatgtctgcagatgctatgcctaaaaagccatggcctaagggacatgaacacggcatctttattaccacttatggtaagattgtcttcaatcaattgttcccagatgattacttctatatcaatgaaccaactgaagagaacttgaacaatccgttggatgctaagtacttcttaggtgaaggcgaagagattgataagaagatcgatgaagtaggcgatgatttaatcgctagtccatttaagggaagcttcttgtcagattctattgctactatttacaagtattacaaggttcaaagaacttcagaatacttggatgatttgaagaagttaggctacactagctcaactacttcaggtattactattggtatgactgacgttccagaaatccaagataaggatgaaaaggtagccaaggcacgtaaacaagttgatgttgtttctaagcaatttagacgtggtttgattactgaacaagaacgtcacgaccgagtaattagtatttggaatgcatgtaaggacaagatccaaaacgaaattgcacaaattcacgcacctcgtaatccaatttcaatcatggcagactcaggtgcccgtggtaacatttctaactttactcagttagccggtatgcgtggtttgatggccactcctaacggtggtttgttcgaaattcctgttacttcaaactttaaggaaggtttgtcagtattggaattgttcatgtccactcacggtgctcgtaagggtatgactgatactgcattgaagactgctcagtcaggttacttgactcgtcgtttggttgatgttgctcaggacgttattattcgtgatgacgattgtggtactgatcgtggtattacagttagtgccatcatggaaggtgacgaaatgatcgaaccattatttgaccgtttggttggtcgtttcactgctgagactgttaaagatcctgaaactggcgaaactattgtcggcagagatgtcatgatggatgaaaacatggcacacaagatttgtgatgcaggtgtaactcacgttaagattcgttcaattcttacctgtgatactcctcacggcgtatgtcgcaagtgttacggtatgaaccttgctactggtgaagaagttgaagttggtgaagcagttggtactgttgctgctcaatcaattggtgaaccaggtactcagcttactttgagaactttccacaacggtggtgttgccggtgctgaagatatcactcaaggtttgcctcgtgtgcaagaattgtttgaagcacgtaaccctaagggtcgtgcaaccatttctgaagttgatggtgtaattgattcaattcaagaaaacccagcagaacatactcgtgaaattactgttaagggtaagattgatactagaagctacagtgttccttatacagcttcagttgctgttagcgaaggtgactacgttcatcgtggtgacaagttaactcttggttctgttgatcctaaggaattgattcaagttactgatacattaactactgaaaagtacatcttagctgaagttcaaaaggcttatagaatgcagggtgtagacattgccgacaagcacgttgaagtgttaactcgtcaaatgctgcaaaaggttcgtgtccttgatccaggtgaaactgacatcttgccaggtgaagttatggatattggtcaatttagagaccgcaacaaggaagttattatttctggtggtattccagcaactgctcaaagcgttatcttgggtattactaaggctgctttggaaactaacagtttcttgtcagctgcttcattccaggaaaccacacgtgttcttactgatgcatctattagaggtaagaatgatccacttcttggacttaaggaaaacgttattatcggtaaaattattccagctggtactggtatgcctgtataccgcagcatggaacctgaagctgacgttaagaagccagattcagtatactcaattgctgatattgaaaagcaaatgaaagaaaaggataaagctaagcaagactaagctttattgaaaataaataagcatttccaatcttttaagagcgggaatgcttatttttttgtctaaaaaattaattgggttagtactaatcctaggaaaatatatggaataaatggatagcgatggttaataggagttttttcaataagaaaaattgcaattaccaagattgaagcaaatagaaaaactaaattggcaaatgatggggtgaagtagcaagcgataattaagtaaattaataaatcgcctagccccatttttctttgcattatgctatagctaaaaattcctagcaataatgtaaaagagatccagtcgattaatgtaaaagctgcaaattggttgaataaaatcgcaacgctaatggctggaattagtaggagaagatcaaattcttgcttttgataatcagagattgcaacgactaaaagcgaaaaaagcaaaatagcggtaataatgtcctgtgtcttactaaaatcgagtaaacaaaaggcaaagccgccaattaattcaaataaaaataattcaactggaatttgttgataacaataacgacattttccttgaagaaaaagataagataataatggaatttcatccaaaattgataattcaaggtgacagttgttgcactgagaacgtgagtaaataaaatttttatcattccagtgctcgtaaactactgctgcgtgagaagccaagcaacttccaattataaagttagtaaaaataaataagtatttcaaaaaaacacctccactatttattacgcaaaaatagccgatttttctttttttattttgaaaaagtttgctttctgcttaaaaccgagtacaatagtctttgtatgttttgaacagtctattcgtgagtaaaaaagaaactcccggatgtgtgaacaaaatagtattttaggaggaaaaattaatgccaaccattaatcaattggtaagaaaaggccgtcattcaaaggtcactaagtcaaagtcacctgctttgaattacagctacaacagtatgaagaaggaatcagtattcaacccagctccacaaatgcgtggtgttgcaactcgtgttggtactatgactccaaagaagcctaactcagctttacgtaagtacgctcgtgttcgtctttcaaacttgatcgaagttactgcttacattccaggtgaaggccacaacttgcaagaacactcagttgtattaatccgtggtggtcgtgtaaaggaccttcctggtgtacgttatcacatcgttcgtggtgcccttgatactgctggtgttgatggcagaaagcaaagccgttctaagtacggtactaagaaagattaaaggaggagttaaataatgcctagaaaaggtcacgtaactaagagagacgttttagcagatccagtttacaactcaaagcttgttactaagttgatcaaccacttaatggtcgatggtaagagagctaaggcatcttcaatcctttacgatgctttcaacattgttcaagacaagactggtaaggaaccacttgatgtatttgaagaagctatgaacaacgttatgccagttttggaagttagagctcgtcgtatcggtggttcaaactaccaaatcccagttgaagtacgtcctgaaagaagaactactttaggtttaagatggcttgtttcatacgctcgtttacgtaacgaacacactatggatgaacgtttagctaacgaaattatcgatgcttcaaacaacactggttcagcagttaagaagcgtgaagatgttcaccgtatggctgaagctaaccgtgcatttgcacactaccgcttctaatttgttcgttttaatttaaggagagaataatttatggctaacaagcgtgaatttccattagcaaagacacgtaacatcggtattatggcccacatcgatgcgggtaagactactactactgaacgtatcctttactacactggtaagatccacaaaattggtgaaactcacgaaggtgattcacaaatggactggatggatgaagaaaaggaacgtggtatcaccattacttctgcagctactactgcacaatggaaagaccacagaattaacatcatcgacaccccaggacacgttgacttcactatcgaagtagaacgttcacttcgtgttcttgatggtgccgtaactgttcttgatgcccaagctggtgttgaaccacaaactgaaaacgtatggcgtcaagctgaaacttacggtgttcctcgtattgttttcgttaacaagatggataagatcggtgctgacttcgataagtcagttaagtcattgcacgaacgtttaaacgctaatgcccatgctgttcaaatgccaattggttcagctgacacttttgaaggtgttatcgacttaatcaacatggttgccgacatctacgacgaagataagcttggttctaagtgggatactgttccagttcctgacgaatacaaggaagaagctgaagcacgtcgtaacgacttaattgaagccgtagccgatgttgatgacggcatcatggaaaaattccttggcggtgaagaaatttctaacgatgaattaaaggcagctatccgtaaagctactttggacttgaagttcttcccagtttacgctggctcagccttcaagaacaagggtgttcaaatgatgcttgacggtgttattgactacttgccatcaccacttgacgttaagccttacgttgctcacaatcctaagactggtgatgaagttgaacttatggctgacgataagaagccatttgcagctcttgcatttaagattgctactgacccattcgtaggtcgtttgactttcatccgtgtttacaccggttctcttgaatcaggttcatacgtattgaacgcttcaaagaattcacgtgaacgtgtaggtcgtttgcttcaaatgcacgctaactcacgtactgaaattccagaagtattctcaggtgacatcgctggtgctatcggtttgaagaacaccactactggtgactcattaactgacccagatcacccacttattttggaaagcttgaaagttccagatccagttatccaagtatcagttgaacctaagtcaaaggctgaccgtgataagatggacgttgctttgcaaaagcttactgaagaagacccaactttccgtgctgaaactaacccagaaactggtcaaaccttgatttcaggtatgggtgaacttcaccttgacatcatggttgaacgtatgagacgtgaatttaacgttgatgctaagattggtgaaccacaagttgcttaccgtgaaaccttcaccaaggaagctaaggcacaaggtaagtttgttcgtcaatcaggtggtaaaggtcaatacggtgacgtttggattgactttactcctaacgaagaaggtaagggttacgaattcgaagatgccatcgttggtggtgttgttcctcgtgaattcattccttcagttgaccaaggtttacaagaagctatgaataatggtgttcttgcaggttacccattgatcgacgttaaggctaagctttacgatggtagttatcacgaagtcgactcatcagaagctgccttcaaggttgctgcttcacttgctttgaagaatgctgcttcaaaggctggcgcagttatcttggaaccaattatgaaggttcaagtaactactccagaagaatacttaggtgatgttatgggttcaatcactgctcgtcgtggtaccatggaaggtatggaagacagagccggtgctaagatcatcaactcatttgttccactttcagaaatgtttggttacgcaactactttgcgttcatcaactcaaggtcgtggtacatttactatggtatttgatcactactcaccaacacctaaatcaattcaagctgacatcattaagaagcgcggcggagatgctgaatagcttccgttaagaactgattaatgcagtagcttaattgaaaacaatttcatataaaaaagagttatcatttttattttgataactctttttttgtaaataaatttaagaaaaaagtcgtaaacccttgatatttaaggagggacaaagtacaatagtctttgtgcttatgggacagtgtgcccttaagtgtgaaaattgttgtaaagcgttgacgcaaaaggttgcggcacgccaggctgcattgccacagtggcgtgcgggaaatttttgccgagcgagtcatcttttaaagaagacgttaaggaggtaatttaatggcaagtcaaacaattcgtattagacttaagtcttacgaacatggtattctcgatgaatcagctgctaagatcgtagctactgcaaagagaactggtgctgaaatttcaggtccagttcctcttccaacagaaagaactttattcacagttcttcgttcaccacacaagaacaaggactcacgtgaacaattcgaaatgcgcactcacaagcgtttaatcgatattttgaatccaacaccaaagactgttgattcattaatgaagcttgatcttccaagcggtgtagacatcgaaattaaactgtaatttaaatagaaagaggtgtaaacatgaccaaaggaatcttaggaagaaaagttggtatgactcaaatctttactaaagatggtgtccttgttcctgtaactgttgttgaagcaactcctaacgttgttatgcaagttaagactgttgaatcagatggttacgaagcagttcaattaggttaccaagacaagcgtgaagttttgagcaacaaaccagaaaaaggtcatgctgataaagcaaagacttcgcctaagcgcttcattcgggaaatccgcggtgttgagcttaaggactatgaagttggctcagaagttactgtggatacatttaaggaaggtgacgttgtaaacgttactggtacttcaagaggtcatggataccaaggtaacatcaagcgttggggccaatcaagaggaccagaaactcacggttcaagataccacagaattcctggttcaatgggttccatcattaaccgtgtaccaaagggcaagcgtttgccaggtcacatgggtgtgaagaaagttaccattgaaaacttagtaattgaaaaagttgttgcagacaagaacgtattgatgattaagggtaacgtcccaggtgctaagaactcattaatcgttgttaaaactgcttctaaagctgtaaaggctgataaataggaaggaggactagaatggctaatttaaaagttatggatcaaaacggtaaagactctggtgaagttactttaaacgataaggtttttggtattgaaccaaatgaaagtgtcgtttttgaagcaattattagacaaagagccggcaagcgtcaaggtacctcaaaggttaagaatagatctgctgttcgcggcggtggtaagaagccttggagacaaaagggtactggtcgtgctcgtcaaggttctatcagagctccacaatggcgcggtggtggtacagtctttggcccaactccacgttcatacgcatacactatgccaagaaagcaacgtcgtttggctattaagtcagttctttcccaaaagttgattgacaatgatttaattgttttagataagttgactatgtcagctcctaagactaaggaattagtatcaatgttaaacggcttaaatgctgacggtaaagttttaattgtttcagatgataacaatgtacaactttccgcaagaaacttgactaaggttaaggttgttccagttaatggcttaaacgttgaagatgctgttaactatggcaagttgatcttagatcaagatgctgttaagaagatcgaggaggttttggcttaatggacgcacgcgatatcattttaagacctgtcattactgaaaagtccacgaacttaatggatgataagaagtacacattcgacgtgcttttaactgcaaccaagacacaagttcgcaatgctgttgaagaaatcttcgatgttaaagttaagaacgtaaacattatgaacgttcgcggcaaggacaagcgagtaggtcgttacactggtaagaccgctcgtcgtagaaaggctatcgttactttaactaacgattcaaacgacatcaagattttccaagacgataacacagaagacaacaagtaataggaggtcagtcaattggctattaagatttacaagccaaccacgaatggtcgtcgtcatatgacttcttccgactttgctgagatcaccaagacaaagcctgaaaagactttacttgaatctcaatcacatactgcaggtcgtaactcatatggtcatatcactgtaagacaccgtggtggtggtcacaaacaaaaataccgtatcatcgactttaagcgtaacaaggacaacgcaaaggcagttgtaaaggctatcgaatacgatccaaacagaactgctaacattgctttgcttcactacactgatggtatcaaagcttacatcttagctcctaagggcttaaaagttggcgatgtagttgaatcaggtgattcagttgacattaagccaggtaacgctttggaattaaagaatatcccaactggtacttcaattcacaatatcgaattaaagccaggcaagggtggtcaactcgtaagaagtgctggtgcttcagctcaagttttaggtgctgatggtgattacactttagtaagattacaaagtggtgaagttcgtaagattttgtcatcatgccgtgcaactatcggtactgttggtaatgaacaacactcattgattcaattaggtaaagctggtcgtaaacgttggttgggcaagcgtccacaatcacgtggttctgtaatgaaccctaacgatcacccacatggtggtggtgaaggtaaggctccagttggtcgtcctcaacctatgactccatggggtaagaaggcacgtggtattaagactagagataccaagaaggccagcgagaagttaatcattcgtcaccgtaaaggtagcaagtagtagaaggagggttaattaatgagccgtagtattaaaaaaggtccttttgctgatgcatcattgttaaagaaggttgatgcacaagcagatgcagataagaagcaagttattaagacttggtcacgtcgttcaactattttcccttcctttgtaggtttgactatagctgtttacgatggtagaaaacatgtcccagtatatgtaactgaagacatggttggtcataagttaggtgaatttgttccaacaagaactttccacggacacaaatccactgatgataaagccacaacacaagcttagaggaaggagaaacatctaaatggcagaacaaattagttcagctaaggctgaagcaagaactgttcgcatcgctccaagaaaagctcgtttagtcgttgacttaattcgtggcaagagcgttgctgaagcattagcaatcttggaatttacgcctagagctgcttccccaatcgttgaaaaagttttacgttcagctattgctaacgcagaacataactacgatcttgaaagtgcaaacctttacgtatcagaagcttacgtaaatgaaggtgcaactttgaagagattccgcccacgtgctaagggtatggcttctccaattaacaagagaaccagtcacgtagttgtagtagtttcagaaaagaacgattaagggaggtatattaatgggtcaaaagattaacccaaacggttttcgtctcggtgttatccgtgattgggaatcaaaatggtatgctgacaagggatacaaagaaactttaaatgaagaccttcaaatcagaaaatttatttcagaaaagttgaaggatgcctcagtatctactgttgaaattgaacgtgcagcaaacagaatcaacatttcaattcatactgctaagccaggtatggtaattggtaaaggtggttctgaagttgaagctttgagaaaacaattaaatgctttaactggtaagcaagttcacattaatattgttgaaattaagaaaccagatcttgatgctaagttagtagcagatagtattgctcgtcaacttgaagctcgtattgctttcagacgtgctatgcgtcaagctactcaaagagctatgcgtgctggtgccaagggtattaaggttcaaacttcaggtcgtttgaacggtgccgatatggcaagaagagaatggcacacagaaggtcgtgttccattacaaactttgagagctgatattgattacgcttgggtaaatgccttcactacttatggtgaaattggtgttcaagtttggatcaaccgtggcgaaatcttacctactcgtaagaataagccagcttcaaagccagcgaagggaggaaatagataatgcctttagtaccaaagcgagtaaaacaccgtcgtgaattccgtggtaagatgcgtggtgctgctaagggtggtaaatatattgcctttggtgaatatggtcttgaagccctcgaatcacattggattactaaccgtcaaatcgaagcagctcgtgttgctatgactcgttacatgaaacgtggcggtaaggtttggatcagaattttccctcaaaagtcatacactgctaaaggtgttggtgtacgtatgggttcaggtaaaggtgcaccagcaggttgggtagctgtagttaagagagaaaagattatgttcgaaattggtggtgttgatgaagcaactgctcgtgaagctttacgtcttgcttcaactaagttaccaattaagactaagtttgtaactagaagttcggaagtaggtggcgaatctaatgaaggctaaagatatcagagcattaaccactgatgaaatgttagaaaaagaaaagcaatacaaagaagaactcttcaatttgcgtttccaacaagcaacgggtcaattagaaaataccgctcgcttgagcaaagtccgcaagaatatcgccagaatcaagactattctgagcgaaaaagcgttagaaaacaattaatggaagggagctattaacttgagcgaaacaaacgaaagaaatcgtcgtcacgtataccaaggtcgtgtagtttctgataagatggacaagactatcgttgtagttgttgacacttacaagaaccaccctgtttacaacaagcgtattagatattcaaagaagtactacgcacaagacgaaaataacgaagctaaagttggcgatactgtacgtatcatggaaacccgtccattatctcgtaagaagcgcttccgtttagtaaagattgttaagaaatctgtttaatttgcggatttagtgaggggaggattacacagtgattcaaaacgaatcccgtttaaaggttgctgataactctggtgccagagaacttttagttattagagtcttaggtggttcaaagcgtaagaccggtaacattggtgacatcgtagtatgtactgttaaacaagcaacaccaggtggcgttgtcaaaaaaggcgacgttgtaaaagctgttattgttagaactaaatcaggtgcacgtcgtgaagatggttcatacatcaagttcgacgaaaatgctggcgtaattatcaacgcagacaagagcccacgtggtactcgtatctttgggccagttgcacgtgagttacgtgagaacgactttatgaagatcgtctctcttgctcctgaagtcttataattgatagtgaggtgcactgatgttcgttaaaactggtgacaaagtaaaagttattgccggaaaagataaaggtaaagaaggtactgttctttctgttaacgttaagaaaaaccgtgtagtggttaagggcgttaacaagattaagaagcaccaaaagccttcacaaagcaatgctaatggtggtgtagttgaatcagaaggttcaattcacgcatcaaacgttaaagtaattagtagtaaaaaagaagataagtagaagggaggacacacatggcaagttatttagctaaggaatacaacgaaaaggtagctcctgcattagaagaaaagtttaactacaagtcatctatgcaagtacctaagatcgacaagattgttttaaacatgggtgttggtgatgcagtttctaacgccaagaacttagatgaagcagttgaagaattaactttgatctcaggtcaaaagccattaatcactaaggccaagaaatcaatcgctaacttccgtttacgtgaaggtatgtctatcggtgctaaggtaactcttagaggcgacagaatgtacgatttcttgtacaagttaatcaatgtttctcttccacgtgttcgtgacttccgtggtgtatcaactcgttcatttgatggtcgtggtaactacactttaggtattaaagaacaattgattttcccagaaatcgattttgataaggtaaaccgcactagaggtttagatattgttatcgtaactactgccaacactgatgaagaagctcgtgaacttttgactcaatttggtatgccgtttgcaagatagtggaggacattaatggctaaaacatcacaaaaaatcagaaatcgtcgtcctgctaagttctcttcacgcgaatatacacgttgcgagagatgtggtcgtccacactccgtataccgtaaattcgggttatgccgtatttgcttaaaggaattagcacacaagggtcaaatccctggtcttaaaaaggctagttggtagtatacggttaggaggatagcttaaatggtcatgacagatccaatcgcagattacttgactagaatcagaaatgccaacatggcaaaacacgattcagttgaaattcctgcatcaaacattaaaaagtctatttcagaaattttgaaacgtgaaggcttcatccgtgattacgaagttgcagatgataacaagcaaggcgttatcaaggtattcttgaaatatggtccaaatggagaacgtgttatctcaggtttgaagcgtatttctaagccaggtcttagaaactacgttggcgctgaagacttacctaaagttcttaatggcttaggcattgccatcgtttctacttctgctggtgttattaccgacaaggaagcaagacaaaagaacgttggcggcgaagtaattgcctacatttggtaatactgacagaaaggagaacaatcaatgagccgaatcggtttaaagactattgaagtccctgacagtgtcactgttaccaaggaaggcgacaatattactgttaagggcccaaagggtgaattaactagatacttcgatccaaagattaagtttgaacaaaaagatggtgaaattaacttttcacgttcaagcgaaagcgacaaagcacttcacggtactgaaagagctaacttagcttcaatgatcgaaggtgtagttgacggttataagaagactttgaagttaatcggtgttggttaccgtgcacaagcacaaggcaacaagattactttaaatgttggttattcacacccagttgtattgactgcaccagaaggtgtttctgtaaaggcaacttcagcaactgatgtagaagttgaaggtgtttcaaagcaagatgttggtcaatttgcagctgaaatccgtgccgtacgtccaccagaaccttataagggtaaaggtattcgttatgttgatgaatacgtacgtcgcaaggaaggtaagactggtaagtaataagtagttatttttgaggtgaaattgtgatttctaaaccagataaaaacaagttacgcttaaagcgtcatagacgtattcgtggaaaaatttctggtactgctgagcgcccacgcttaagcatttttcgttcaaataaaaacatctacgctcaattaattgatgacgtagcgggtgttacgcttgcaagcgcctcaactttggatgaaaatgtatcagatgcaactaaagtagaacaagctgctgctgtaggtaaggcaattgctgaagctgcaaaggcaaaggacatttctactgttgtattcgacagaagtggttacttataccacggccgtgttcaagcattagctgatgctgctcgtgaaaacggattagatttctaggaaaggagaattaacacatggcaaaccgcaatgattctcgtaacaatcgcagaaacaaagacgatatcgaagatcaattagtcgctgtcaaccgtattactaaggttgttaaaggtggccgtcgcatgagatttgctgctcttgttgttgttggcgacaagaaaggccgtgtaggttttggtactggtaaagctcaagaagtcccagaagcaatccgtaaggctgtagaagacggtaagaagaaaatgatcaatgtacctaaagttggtactactattcctcatgaagttattggtcactacggttcaggtaacattttattgaaacctgctgaagctggttctggtgttgctgctggtggtgccgtacgtatcgttatggatatggctggtatctcagacgtaacttcaaagtcacttggttcaaacactccaattaacgttgttcgtgcaactatcgatggtttgaagaagcttagaactagtgaagaagttgcaaaacttcgtcaacctgaaagagcttaagattagggagatcatagatgactgatttaaagattactttaattagaagtgttgctcaccgtctacctcaacaaagaaagatcgttaaagctcttggtttaggtagagtggatagtactgttgttcttccagacaacgctgctactcgtggtgcattattaaagattgctcacttaatctctgttgaagagattaacaaatagaatatcaaggaggtgccaaattaatgaagcttcatgaattacattctgctgaaggctcacgtcgcaatagaaaacgtgttggtcgtggtacttcaagtggttacggtaaaacttcaggccgtggtcaaaagggtcaattagctcgtcaaggcggtcatactcgtttaggttttgaaggtggtcaaatgccattattcagaactatgcctaagcgtggttttaagaacattaaccgcaaggaatatgcaattgtaaacttagatgatttaaacaagttcgaagacggcagtgaagtaactgtagaatcacttaaagataatggcttagtaaagaaagaattgtcaggtgttaagttacttggcaagggcgaattaaaagttaagttaactgtaaaggttaataaagtttccgcatctgctaagcaagcagttgaagccgctggcggaactgttgaggtgatctaatgttttcgaccttgaagaacgccttcaaagataaagaaattagaaataagctctatttcacgctctttattcttttgctgtatcggatcggtgcaaacattaccgttcccggtgttaatgcgaaggcgatcacgcaggttgcgcaaactggtttagttccaatgctggatactgtatctggtggtggactagataactattcaatattttctttgggtgtttctccttatattacggctcagattgttatccagctgctacagatggatattgttcctacgttagtagaatggggaaaacaaggtgaagtaggtcgacgtaaaacaaatcaagtaactagatatttagcattagttgttgcttttatccagagtattggtattacgttaggctttaacgctttaactcaaatgggtttggtaaagaatcaaacaccacagacttatatagaaattgctattgttatgactgctggaactatgttattaacatggttgggtgatgaaatcactgataagggtctaggtaatggtatctcagtaattatttttgctggtattattgcaagactaccaagtggtctatggcaaatttataaggaagaaattattaataatagtgctagtgatcgttggcaaggcattttgttcttcatcgcggttatagttgcaatccttatcgtaactcaatttgttacatgggttgaacaagctgatcgtcgtattccaattcaatatacgagaagagcgacgatgagtggttctgaaagttttctaccattaaaggttaatgtatctggagttattccggttatttttgccagttcatttattgttacaccggcaacgattttaatggcctttcaaagaacccagggcgatcaacaatggtttaaagtaatgaaccaaatctttagcttacaaactactcctggggtaattatctacactcttttaattatcttatttacattcttctacgctttcgtacaggtcaaccctgagaagctagcagaaaacttacaaaagcagggtgcttatattcctagtgtatggccaggaaaagatactcaggattatatttcaaagatgttgatgaaattatcaacagtaggttcattattcttgggcttagttgctttactgcctcaattggctactaacttttggaatctcccaagttccattggtttaggaggaacaagtcttttaattgtgattggggttgttctcgagttatctcgtcaaattaacggcttgttaatgaagagagaatatgttggattcatcagataggaacggataaatgattaacttaattcttttagggttaccaggtgctggtaaaggtacagcatcagagcgaatcgttgataaatatcacttaactcatatttcaactggggatatgtttagggaagcaatggctaacaagacgaaggttggtcttgaagctaagagttatatcgataagggtaatctagtacccgatgaagttactgcaaagttggttgaggaacgtttaagtcaacctgatattaaagaaggttttatcttagatggttttccaagaaccactgtacaagcagaacttttagatggtattacaaaacgtttggagaaacctttaacaaatgtcattgcgcttgaagttgacgaagacactttgattaagcgtttatcagcaagatacatgtgtaaaaattgtggagctacttacaacaagctttccaagcagccaaaagttgagggcacttgtgatcgctgtggtggccatgaattttatcaacgtgaagatgataaaccagaagttgttaagaatcgtcttgaagttaatgaaaagatgaatgcacctttgaaggacttttatcagaagaaaggcttgctcactgtaattaatggtgaacaaactccagaaaaagtctttgaagatattgatgcggtattgagtaataatcaatagaagaaaaatttgtataattttttatccgtgttataatttcaaagtatatgactgtttaattgcggaggaacaactttggcaaaagatgatgtcattgaagtagaaggtaaggtagttgataccttacctaatgctatgtttaaagttgaattggaaaatggagccacaattttagcacacgtttctggtaaaattaggatgcactacattcgtattttgccgggagaccgtgtgactgtggaattatctccatatgatttaactaaaggtagaattacgtatcggtttataaagtaatataacggagggaaacatgaaggttagaccatctgttaaaccaatgtgtgaacattgtaaagttatcaagagacatggccgtgtgatggtaatttgctcagcaaatccaaagcacaagcaacgtcaaggttagaaatagagggggtgtagtttatggctcgtattgctggtgttgacttaccaagagataaaagaatcgttatcgctttaacttacatttacggtatcggtgaagcaactgccaagaaaatttgtgcttatgctggagtatctgaagatattcgttcaaaggatttaactccagaagatcaagaaaagcttcgtgctgaagttgacaagtaccgtgttgaaggtgacttacgtcgtgaagtaagcatgaacattaagcgtttagttgatattggttcttaccgtggtattcgtcaccgccgtggacttccagttcgtggccaaaataccaagaacaatgctcgtactcgtaagggtactaagagaaatcgttaattttatttataaggaggtttattgatgcctgcaaagaaaacagcacgtaagcgtcgtgtgaagaagcatgttgaaagcggtgtagcacacattcactcaacgtttaataatactttagtcatgattactgacgttcaaggtaatgcagttgcttggtcttcagctggtgcattgggctttaagggtagtcgtaagtctactccatttgcagctcaaatggcagctgaagcagcagctaagagtgcaatggaccaaggcatgaaacatgtagaagtttcagttaaaggtcctggtgctggtcgtgaatctgctattagatcacttcaagcaactggtcttgaaattactgcaattcgtgacgttacgccagttcctcacaatggttccagaccaccaaaacgtcgtcgtgtttaattttgtccttgatataggacgtaacgttttgaaaggggcccagtaatgattgaatttgaaaaaccaaatattaccgttgttgaacaagaagattcttacggtaagtttgttgttgaaccacttgagcgaggctttggtactactttaggtaattctttaagaagagtattacttacttctattccaggtactggacttgtttatgtgcaaattgatggcgttttacacgagttctcaacagttcctggcgtcagagaagatgtaaccaagatcatcttgaacttgaagaaacttgaattaaagtctctttcagatgaacaaaaggttattgaattggacattgaaggtccagccacagtaactgctgatgatcttaaagttgatgcagacgttcaagtcttgaatccggatcaatatatttgtaccattgctgaaggtggacacttgcatatggaacttgccgtaaagaatggtagaggttatgttgctgcaagtgacaataagagtgatgacatgccaatcggagttatcccagttgactctttattctcaccaattaagaaggttaactaccaagttgaatcaactcgtgttggtaagagagatgactttgataagctcacttttgagatttggactgacggttcaatcaagcctaatgacgcccttagttttgctgctaaaattttagttgaacactttaaggtatttgaatcagcagatgcaaatgctaaattcagcgaagtaatggtggaaaaggaagacgataagaaggaaaagaagcttgagatgactatcgaagagcttgacctttctgttcgttcatataactgcctgaagcgtgctggcattaatactcttcaagagttaactgacaagacagaatcagatatgatgcgtgtacgtaacttaggacgtaaatcattggaagaagttaaaaataaattaaccgacttaggtctttcacttcgtcaagaagactaagcttaggtgaataaaggaggcaaatccatggcataccgtaaattaggtcgcgatagtgctcacagaaaagcaatgcttagagaaatgactactcaattaatcatgaacgaacgcattgttactactgaaactcgtgctaaagaagttcgtaagactgccgaaaagatgatcactttaggtaagcgcggcgatttagcagctagaagaaaggctgctgcatttgtacgtgacgaagttgcagatgttcacgaagaaaaagatgcagttgttgttaagtcagcattgcaaaagcttttcagtgatgtagcacctcgttacaaggaccgtaatggtggttacaccagaattttgaagttagccgttcctcgtaagggtgacgctgctccaatggttattcttgaattagtttaatttagagtaacacaacttaatacgtattaagaattatccatgaaagtgagaataagcgtaaagatgatggcgcaagcttagtctagcttagatgataaaaatcatccctcttcatgggtgattttttttgctctttttttctgttacaattgctaataagcgatttaagaaaggaagtggaaaaatgccagtagatagtgctgttgaatttaaggatgtctcatttacctatcccgatactaaaaaagcgattcttgatcagattagttttaaaataaaaagaggttcctggacatctttgataggtcacaacggtagcggtaagtccacaatttctaaattaattaatgggttacttttgcctgattctgctaataattctagaatcactgttttaggaatgacgttaaatcaaaagacagtctgggatgttagggaaaaagtcggtattgtatttcagaatccagataatcagtttgttggagctactgttggcgatgatgttgcttttgggcttgagaatagagctgttcctcgggagcaaatggtaaaaatagtcagaaaagttttagcagacgttggaatgctggattatatagatgcagagccagctaatctttctggtggacaaaagcaaagagtagcaattgcaggtattcttgccgtagaaccgaaaattattattttagatgaatcaacttcgatgcttgatcctaaggggagagagcaggtgctaaaaattattaagcatttaaagaaagagaagaatttgacagttatttcgattacacatgacattgatgaggctaatatggctgatgatgtgatcgtcttaaatgatggcaagattttagctcaaggaactccaactgaaatttttagtaaaactgaaatgttgcaagaaatagggctagacattccatttgtacaaaaattaataaataaattaaatgaagtgggaatttctgtacctaaaaatataaaaacgaaagatgagttgaaacaatatctatgtcaattaaatttgaaaaagtaaattatatctattctcccggaacttcaatggagaaaaaaggattagataatgtttcatttgaattaactgaaaatagttttgttgcattggtaggtcataccggtagtggtaagtcgactttgatgcagcattttaatgcattactgaagccgagttcaggaacaattgatattgctggttatcatattactgctcaaacaggaaataagaatttgaaaaagttacgcaagcgggttagtttggtttttcagtttcctgaagcacagctttttgaaaatactgtgcttgaagacattgaatttggtcctaaaaattttggagcaaccgatgatgaagctaaaagtaaagctttgaaatggttgaagcgagtaggattggatgaatcgatggcaaataagtcgccatttgagttatctggaggacaaatgcggcgtgttgcaattgctggggtaatggctgatgaaccagaaattttatgcttagatgagccagcagcggggttagatcctaagtctcgtaaggaaatgatgaaattatttgttgattatcaaaaagcaggtcatactgtaatcttggttacgcataatatggatgatgtggtcgaatatgcagatgatgttttagtgatggaacatggtaaattaattagacatgatgcgcctaaggcgatttttactaataaaaactggctagaaaagcactatttgagtgaaccaacggctagtctttttgcctcagatttgacgaactttaactttaaagataaaccgttaacactggatcagcttgttaatgaaattaagaaaaatttgcgagggtagtttatgagtaagataattgtaggacgttatattccgggagattctcttatttataaaatggatcctcggagtaaattattagttaccatattatttatattggctatctttttagctaataattcaataacttatgcgattgtgaccattttttgttttttggctgtgatcgctacaggattaaatgcaaaagtattttgggatggcgttaagcctttgattggtttaattttctttacgtcgcttttgcaattgttttttatgactggtggtcatatttattggcattggtggattttttcattatctagctacggtttgattaatgcaatctatatttttattcgttttacattaattattttaatttcaacagtaatgacagttactacaatgccacttgaaattgctgatgcgatggaatggttgcttaagccgcttaagttgtttaaagtgcctgtggataaaattgcgttagtaatttcaattgcacttcgtttcgtaccaacattatttgatgaaacattgaaaattatgaatgctcaaagatcacgtggagcagattttaatgatggtggtttgattcaaagagcaaaagcaattactccaatcttagtgccgctgtttattcattctttagaaacagcaattgatttatcaacggcaatggaatcacgcggttaccgtagtagtgaaggacgaacaagatatcgtgttttaagttggtcaaaatatgatctaattgcattaatctattttgtattgttggtcggattattattaatttttaggacacattaaagatatgacaacaagatataagatgacgatggcttatgatggccatctttttcatggctttcagcttcagccagatcagcgaacagtgcaaggaacaattgaggatgcactgaaaaaaatgactaaaggaaaacgagttattgtgcagggctcaggacgaaccgatgcaggtgtgcatgcagttgggcaagtaattcattttgattatcctgggaagacaataccagcgaatagaatgattttagcgatgaattcaatgatgccaactgatattatttttaataattgtcaaattgttaatgatgattttcatgcacgttactccattaaaggaaaatggtatcgttatcgcgttagtttagatcattttgttaatccatttaaacgtttttatacaggacattttccatatccactagatattgaaaagatgcaaattgcggcacaagatttgttgggaaaacatgactttactagttttgcggctagtggtggtcgaattgaagataaagtgcgaacaatttattatgtaaaaatcacagaggataaaaaagataatgaagtgatttttgacttcattggttcaggattcttatataatatggttcgaatcatggtagcagcgttgcttgagattgggaatgatcgtagaccagtgcatgatttgcagcgggtaatcgcggcaaaagatcgacaagaagtgagacaaacagctcatgccagcggtttatatctttatcatgttttttatgatgaagtaccacaaaaatatcgcttagatcagcatttataattgacattttgcctaaaaggacgtactctaatatagtatgtttgtccacgataggccccggaaacttattgttttcaaactgcaaataaacggaggaatttaaattgcgtactacaccattagcaaaatctagtgaaatcgaacgtaagtggtacattattgatgcaactgacgtaacccttggtcgtctttctgctgctgttgccactattttgagaggtaagaacaagcctcaatacacacctaatgttgatactggtgataacgttatcgttatcaacgcatcaaagattagattgactggtaaaaaggcttcagacaagttctactaccaccactcatcatggcgtggcggcttgaaggccgtttcatacggtgaattgcttgctaataacccagttaagatggttgaaatctcagttaagggtatgcttccaaagaacactcttggtcaccatgaattcatgaagatgcatgtttatgctggcgaagaccacaagcacgaagcacaaaagcctgaaaagttagatattaacaaattaatctaggaggttatataatggcacaacaagctgcatacacaggtactggtcgccgcaaggattcagttgcgcgtgttcgtttagtaccaggtaacggtaagatcactgttaacgataaagatgttgatcaatacattccattccctaacttggttaaggacttgaagcaaccattgacattaactgaaactgaaggtcaatacgacattcacgttaatgttaacggtggtggtttctcaggtcaagctggggctatccgtcttggtatcgctcgtgcacttcttgaagttgacccagacttccgtagtccacttaagaaggccggtttcttaacccgtgacccaagaatgaaggaaagaaagaagccaggtttgaagaaagcccgtaaagcttctcaattctcaaagcgttaatatttacgttcaaaaatgttgttatatcaacgttttggagacttcagttggtcacctatggtcacaatgctatagggattccaatagatttaaagcattcgcatcttgcgagtgctttttttctggcattaattccagatagtatttttcagtagttaagattgaatcgtgtcctaatcttctgctaacataagataaaggaatattattactgaataaaaaagaagcgtgggtatctcttaaaccatgaaatgtggttgaagggatgcctatttttttgagcaattcttttaacataccagactgtttaaagctgaaccagtcaaacaaatagccagaatctttttgagagatatccttcaatagatcgtaaatattcttaggaatagtcacactgcgtctagaatgtttagtttttaatttagtatcgtcagtagtagggctaattgatcgttttacttcaacgcaataatactgaccatcgtaatgcacatcctcaggcttaatacctaaaatttcaccacgtcttaaaccagtactaatctcaagtaataccattaagttaaattcattatctgtatgttcaagtaagtaatgttttaacttagttagatcagacattgatgaagctttattgcgtttaggtaattcttttccgtgtgctttaagtaaactagcaaaatcattgtaaatgtatcccttaacataagcatagcggagagcagttctaattttcttaagtaattcagttaccgttttcttagaatgtgttttgccatatttatctaagatactttgcatttgtacgtcatcaagcttaccaagtttagcggttggaaaaagattatcaattactttaccagctttaacataattatcaaaagttgcttttctaacgtcatgtacttttactgtttgaacgaataaataataaaagtccttgaataaagtgttttgctgggctattgcttgacctttagccttttgtagttcaagagtagtactccaaactttagcttctttttcagttttaaaactcttagttaagtaatcacgttttccgagactgtaaaatagtttgtgtaaggatgaatgattccttaaatttatttctttaaacattagaaaaaggagttcctttctcgtatgattggtttgaacaaaaaaacacatacagaaagaagaactccttcatgaatgattttaccaaagattttgctcaagctctattcaatccagacaaaataaatgatttattgcgcaaagagctacaacaggctgttaataacttgctagaagctgagttgactgcctttctaggctatgatccctatgccagaaatggctggaatactggcaattctagaaatggtgcttatttccgcaaggttgatacccagtttggaccaattgaagtgcaagtgcctcgagaccgcaacggtcagtttcatcagcacacgctgcctgactacaagcagcactctgatgttttggaaagcacgattatcaagctatactccaaaggcgtaactaccagagaaatcgctgacttgattgagaaaatgtatggcagtcattatagtccagctcaagtatcaaatatttccaagcagatgctccccaagattgaggcttatcacaagcgcaagctaagcgacaagtttttctgtgtctatttggatgcgacataccttcctttgcgccgagaaacgtttgagcgtgaagcagtatatattgccattggcattaaacctaatggacataaggaagtcattgactactgcattgctcctagtgagaacattgaagtttggacagagatgcttcaaaacatgaagtccagaggcttgaagcaagttgagctttttctttctgatggtgttgttggcatgaaaacagccttggccaggacttatcctaaagctcattttcaacgctgcctggttcatgtcatgcgcaatatctgcgctaaagtacgcgtcgacgatcgtgaaaagatcatgaacgaattcaagcagatacatcaacagacaagcaaaaaagaagctgcagctgtcttgcacaaattctatgccaaatggaataaagcttatagccatgtcatcaaaggtttgaaggaaattgagcccgatctgctagtcttctacaattatcccaaacaaatcagagcttcaatttattcaaccaatatgattgaatcctttaacaacgtcatcaagcgtaaagctaagcctaaggcagaatttccaactgaacagtcgcttgatgcatttattggcatccaggcaatgagctacaatgaccgttatttcaatcgaattcataaaggctttggtcaggttcaggacaccttagaatcctactttgattaaataaataattaaaaaatcaatttacgagaaagatctatttacacaaaagatttgacagtttccgttttccatgttgatagattgttactctggctctatatgatgagccacgtttttcaatacttgccataaatttaatcgtcctttcaaaagaaaagccgattatcttaccagcaataaagttagcagataaccgactatttctcaaatctttttcaattttgtttctttaagatcgatgaaagcttcgatacttttaatggtaaagcgttctgtgtgttctcctagtttaaatcttttaaagtcaggatcagagcgaaatactttatcaaaagttttgggatcaataccaatatattttgaagcttcttcgcgagttaataatttagccactattattctcctgagattgtttagttaccaatattgagataaaatctaggtagtaggtaatctagtcattgcttttgtctctattagcatgactagtatttttttgcgattttatcttccaaattgcttcggataatttatcatcagtgattagatcatttttaactttattagtattgcttttagtaagttgcaacgggataattcgtcttttcaactgttcaaaagaatcaatgacttgattagcaatattacattcaagataaaaactaagtggatcataaggggtagtgatgtaaatggcacgcgcatttagataacgatcgtgataccttgcgggagccattttgtctatttcccaaggatccaaaagggtaagtagttgaccatagtcatagtcatttggtcgcaagtcattaattactatgaatttttgccctttgtattcttgaaagtgatcccgttgactacctgaaatacagaaatcttcaggatgttgtttttctaaaatttcccgtactaacttagtcttaccaattccggaaacaccatatatccagtagaccttacaactctgacctttgaagtcctttaaaaaccgttgatgctttttgtaagctaggatgtcttcaatatgatctaacagtgttttatgttttgccatctcaagaacaccgatttcttcttgaagttcttctttagtgattttttcatttgaataatcatcaataaagttttcaattgcttgtcgtgatggctttttgactttttgtctaatctcattgattctatctttaaaatcaaatgaagctactacttcttttggatcataatgatgtttactcttagcattagtagtttcatggatcagatagctatagccattgttaataatactgtgccatgcttcaatatattgttcatgatcattgaaaatcttagatactcttgaaatggttttagcatctttgaaatgaagcattacatgatagtgaggtcgaatcttttaacttatctttactaaatggtaaatgatctaaatcttgggtatacataaagttgtgagaacgtattatttttttcacaattaaagatttcctttctattcaacacgaactacatattaactttggggctagataacaagttcattattactttatttttgtttatcagatggaaagcaatagcaagaagcagcagatatattagccaaggctaaggtgcatctatctatggtgatattttcaccttaaatcaaactgcagcagctatggttaaagttgctcaaggaggtaataagggtaaagtattactgcaaatgaatgaagcttaagttaacatgaaataataaatacatttagataaagaaagaccctcaaagattctaaatttgaatttttgagcgtctttttagattgctaatcattttaaaggtacttgtattacatttactcctgctttaataaattcattaattacactgttttctacaaaagtatcagttattaataaatcaatatcttttattgttccaatagtaaaattagagaatttattgaacttgctatagtcggcaacaacaataaccttttgtgattgctgaataatagttttattaacttctgcttcttccataactggtgttgaaataccttggttaatgctaattcctgcgcaaccaataattgcatagttggcacgtaaagatagaaatgctttagttgccaaatcaccgctcatgattaatttatgatgtatttccccacctgttaagatcactttgcttttagtattttcaaaatttccagcataaccattgttagtaacaattattatatcctttgttaataaatgtggaattgcatcaaaggctgtactactagagttaataaatactatatctccatcgtgaatatatctggctgcctcttttcctaagctttgcttaatgtaactaacgggctgagataatgggatttcttctggtgcaacaagggatatgacaccacgcttttttgaaatcttacccatttttgacaaataatcacagtctcgtcgaatagtcatttcagcaaccttcatctttttgcttaattcagaaatagaaatttcccttgtgtgatttagtaaatcaatgatttgcttgcgacgttttttaattacttgaattgaatttttcatttttaatgatctctttcacttcaataaatacttactaatacttcaccagaaaagcattaacttttgaatttaaataaaaaacgacccgaactggttactattttaccattcaaaataataattcacatattttatgttataaatgacttgaattttacaaaaattaacataaaatatgctaaattaacatatataatggttgaaagcgctcacatctaagcgcataataacattgaagacgaggataagaaaattaaggaggatttattcatgtcagcaccaaaaaaaatagaagatgttaatttcaaaacttttgcagaaaacaatttcccagaatggggtacgttcttgaatgaacaaattgctgataagcaagtaccagaaaaaagtattgcaatgtggtggttaggctgtatgggggtttggattaagactcatgaaggcaccaacgttgctattgatatgtggaacggtactggtaaacatactcacggtgacggtaagatgcgtaaaggtcaccaaatgatgcgtatgaccggtggtgaagctttacaaccaaaccttagaaacaagccatatgtaattgatccatttgcacttcgtgatcttgatgctttatgtgtaactcacactcaccatgatcacttggatatttacactgcagcatgtgtaaacaagtattgcccagacgctaaatttattggacctcaaggcgttgtcgatgaatggatcgaatggggtgttccaaaggaaaagaccattgttgtaaagcctggcgatgaagtcaaggttggggccgtaactattaaggcaatggaagcctttgatagaactgaatttgttaccgaagatgatccaaacaagaagttagcaggtactatgccaattgaaatggctaaagttgctgttaactacttagttaagacttcaggtggtaacgtatatcactcaggtgactctcactattcaaacacttacgtaaagcacggtaacgaaaacgaaattgacgtaactctatgtgcatacggtgaaaacccacgtggtatcactgataagcttgacgactcacaagttttgagaatgggtgaagctttaaagacaaaagttattattccaatgcactatgacatttggactaacttctacagtgatcctaaggatattttagctctttgggaccgtaaaaagtaccgtttgcaatataaatttaagccatatatttggcaagttggtggtgaatttgattatccacaagacaaagataatttcgaatacatgtatgatcgtggattccatgatgcatttaagaatgatccagacttaccattcccagaaatgctatagtcccgtttttgttgattaactagctcaacgtctttaaccaaagctgttgagctgagggaggagacgctgatgttacgttactttttagaaaataatttattaaacattactgatgaacatcctgagacttgggaagaagcaattagagttgctggtaaggtaatgaagcaagacaagttagttactgatgattatattgattcagttattgctgatgttaagaaatatggtccatacattgttattgttcctggtgtggcaatgccacactcaaaggctgatagcgaaggagttttaggtactggtataggtcttacaattttgccagaaccagtttcattagatgaatcagacccagataaaagtgcaaaattattctttatgctagcagctaaagataataatacacatgtcaaaaatattgcccatttatctgacatgttaatggaagataacatgattgatgatctttctaaggttaagaatttagacgattataaggcagtaatgaagaaacataatatgtgatatcggaagcggggagtataaatggctatattaaatattctatctaagatatgggattattttgctaccaatattttgcaacaaccagctttcatgattggttttattgtcttacttggttatatcttagagaaaaagaaatggtatgaggtcctttcaggcttcttgaaagcaacagttggatactttattttatcggctggttctgttggactgatcaatacttttagaccaattttagtcggattaaaagatcgttttcatttgaatgcgatggtaactgatccatattttggacagaatgcagttactgccggaattatgaaagagtttggtagatcttttgccgatgctatgcttttgttgttatttgcatacattatcaatatagtgttagtaagattttcaaaatatactaaattacgtgctgtttttacaactggtaacgtgcaagtacaacaagcggctaccgctttctggttgatcttgttctgttttccaaaattaggtcatttacctattttaatcgttatgagtattatcttaggtttatattgggccgttggttcaaacttaactgtagatattactcaagagttaactgatggtgctggctttgctatcgctcaccaacaaatgtttggtatctttattttcgctaattatcagaatttttggaaaatagagccaaaaagaaaggtaagaaagaagccagacgattagaagatgtaaagttaccaggtttcatgtcaattttcaacgacaatatggtatctacatcaattttgatgttaatttttatcggtgcaattttagtagtattaggtccagattacttagttaaagctaaatttatgcaacctggccaaagttttattttctacatcttacaaacttcattacaatttgcagttttcttagcaatcttacaattaggtgttcgtacattcgttaatgaattgactgaatctttcactggtatttcagacaaatggttacctggctcagttcctggtatcgatgtcgcagctaccttaggttttggttcacctaacgcaggtacaattggtttcttgtttggtgcattaggacaattcacaatgatcattttattgttgattttccactcaccaacaattgttatcgccggatttatcccgttattctttgataacgctgctatcggtttgtattcaaataaccgtggtggtttcaaatatgcaatgatcatgccttttatttctggattgatccaaataggcgggtctgccttaattgctacctgggtaggtatggcgaaatacggtggttacatcggaatgttcgattgggctacagtttggccattcttcacagtattgatgaaattcttaggctttgttggtattgctcttgtaataatcattttggtaatgattcctcaattgcaatatcgtgccgataagaaaggttacttcatgattactgaagattatgaaggttggaagaagttacatggtaaagaatagaggttaattaaaatgaaaataatgtcagcttgtgctaatggttcgggaactagtttaatgctttctagaaccgcaagaaaagcaatggaacaattaggttatgaaattacagtttcagatcatacttctgtttcagaagctagaggaactgctagaaactatgatgtggtatttacatcattaccttttgtgaacatgtttgatgaagtaaagcaaaagggtggcgaagtaattggcgttaagaatgtaatgtcagttcctgaagtaaaagaaaagatcgaagcttcagatattccaaataagtttaagaaataatcttaggagaattaatttatggctttaccaatgttacaagttgctttggattgcgagagtactgctgaagctttaaatgtcgcaagacaagtaatggatcaagttgatgttttggagacaggaaccattctttgttatcaagatggtgtaaaggccgtatctgctttaagagcagtgggaccagataaaatagttttagcagatgttaaatgtgctgatgccgggactaagttcggtaaggcaagcaaagatgcaggtgctgattggatgacttgtattaacgctgctactgttcctaccatggttaatgctagaaaagaaattgaagttcaagttgaattatatgaaggctgggacaataaagaacgtatgcaagaatggcttaacaatggtattgatcaagttgtttaccaccaaagtagggatgcaaaatttgcaggccaaaaatggggcgaaaaagatgttgcaaacgttaaggccttgattgacatgggctttaaggtttcagtaaccggcggagttcatccggaagttttgaaattatttaaagacttaccagtgtattgttttattgccggccgtgatatcagaaatgcggaagatccacatgcgcgtgctaagcagtataaagatgaaattaagcgcatttggggttaatcattaattttactcatattaaaaaattccttaattagttttagaaagggcaatgcacgtaaaaacgtttattatgcattgctctttttgtattaaaaggcaggtataggttatgactgtaaactcattaggtatttacgaaaaagcattaccacaagatttatcttggaaagaaaaatttaatttagttaaaaaattaggcttcaattttttagaattttctgtagatgaaagtgatgcacgcttagcacgtttggattggaccaaggaacaaagaaaagaatttagagatttaatgtgggacactgacattcgaattaataatttgatgttatctggccacagaagatttcctcttggatctaaagatccagaaaccagaaagaaatctcttgaaatgtgccaaaaggcagtagatctctgtgtagatttaggaattcataatattcaaatggcaggctatgatgtttattatgaagaaaagagtgagaactctagagaattatacgttgaaaacttagctaaatgtgttcatatggctgcaaagaaaaacattatgctttcgattgaaacaatggatgatccatttattactaacattgcagatattaaacaatataaaaagcaagttagaagcccatggcttcaagcctatccggatttgggtaacctctctgcttggccacaaaatgatcctgctaaggatttagagaatggaattggtaatattgttgccatccacttaaaagatactctggcagtaacagatggttttgagggtaagtttagagatgttccatttggtgaaggctgcgttgattttgaaggactacttcgtgaattagtaagactagactataacggaagttttacgattgaaatgtggccaggtgataacggtgatgatgatcctgttgctgaagttaaagaggccaaagctttctttgacaagatctttaaaaaagttggaattgaacaagaacctgtagattagaaagtggaaaataaaatgttagaagatttgaaaaaagaagtctatgaagccaatatgcaattacctaagttaaatttagttacttttacttggggaaatgtttcagggattgatcgtgaaaaaggtctgttcgtcattaagccatcaggtgttccatatgaagaattaactcctgaggatatggtagttgttaacctaaaaggtgaagtggttgaaggtactagaaatccatcttcagatactcctacacatacctatctatataatcattttcaaaagattggtggtatcgttcatacacactcaccttgggctgtttcatttgctgcagctaagatggatattccagctttgaacaccacacatgcagatactttctatactgatgtgccagcagctgatgcattaactaaagaacaaattgaggaagattacgaaggtaatactggtgtcactattgtcaaaacctttaaagagcgtggtctcgattatgaagcaacaccaggtgctttagtttcacaacatggcccatttacttggggtgaaacaccagctaaggctgtttataatgctaaagtcttagaagttgtggcggaagaagactatcatactttgcaattaacacgtgctaattgccatttaccacaatacctacttgataaacactattatcgtaagcatggtaaaaatgcttactatggtcaaaataatgctcattcaaaagatcatgcaaagcgtgcctaaaactaaggggtaaaaaatgcttgaaaattatttttttgattttgataaaactctggctagttcaggtaaggcgtcattgattgcgacaaagcaggcatttaagttaaataatttagatgagccagatgatgatcaaattttagattttatgggtattcctgctgatgtttcattccctaaaatggctaatagagaattgtcagaaagtgatgcgaaaaaattagttgatacctaccgtaatatttatggaaagtatgaaaaagaaaatacacatttatatcctggaatgcgagatgtactagaggatttacagcaaaaaggtaaaaatttatttgttgtatccagtaaaagtcatgatattttaaagagaaatttagataatttgaaaattactcaatattttaaagactttgtgggatgcgatgaggttcagcattataagccagccccagatggtattttgatacttttagacagatacaatttgaataataaacaaagtgtaatggtaggggatgctcgttatgatttgcaaatgggcaaatcagcgtctgttaaaacttgtggagcagcttgggatgcttttagtgtggatagcttaaagaatgaacatcctgattatttgctatttcatgtggcagaattaaaaaatattgaatagagttcatatattttaaaattggatggtatcaattttgaaagtagttgaactctttagcaaaaatgatattattaacttgtaagggaaaacggttacataacgatggtctataggaggacatcatggctgtagattacgattcaaaagaatatttaaagagcgtcgatgcttattggcgtgcagcaaattacttatcagttggtcaacttttcttaatgaaggccccacttcttaaaacacctttagttgctgaagatgttaagccaaagccaattggtcactggggaactattgctccgcaaaactttatttatgctcacttaaacagagtgttaaagaagtatgatctggatatgttctatattgaaggttcaggtcatggtggtcaagtaatggtttctaactcatatctggatggttcatacactgaacgctatccagagatcacccaagatgaaaagggtatggctaaattgtttaagcgcttcagtttcccaggtggtgtggcatcacatgctgctcctgaaactcctggatcaattcatgaaggtggggaattaggttactcactttcacacggtactggtgctatcttagataatcctgacgtcattgctgctgttgaaattggtgatggtgaatcagaaactggtccacttgcagctagttggtttagtaacaagtttattaatccaattaaagatggtgcggtattaccaattttgcaaatcaatgggtttaagatttctaatccaactattgtttctcgtatgagtgacaaagaattaactgaatacttccgcggcatgggctgggatcctcattttgtttcagtctttaaaggcggtcgttttgacggtgaaaaggatccaatgcaggttcacgaagaaatggctaagactatggatgaagtcattgaagaaattaaggctattcaaaagcatgcccgtgaaaacaatgacgctactttgccacattggccaatgattatctttcaatgccctaagggctggactggtccaaagaaggatttggatggcaacccaattgaaaactcattccgggctcaccaaattccaattccagttgcacaagatgatatggaacataaggaaatgcttgaaaaatggcttaagagctacaagccagaagaattattcaatgaagatggttcacctaagaagatcgttactgaaaatacggctaagggtgaccacagaatggccatgaatccagttactaatggtggtaagaaccctaagcgtttgaacttgccagattaccgcaagtacgcattgaagtttaagccaggtcaaatggaagcacaagatatggttgaatgggctaaataccttagcgaagttgctgatcttaacccagacacattccgtggctttggtccggatgaatctaagtcaaaccgtttgtttgcacttcttgatgatcaaaagcgtcaatgggaaccagaaattcatgaacctaatgatgaaaacctagctccaagtggtcgtgtaattgattcacaattgtcagaacaccaagatgaaggattccttgaaggctatgttttgactggccgtcatggcttcttcgctacttacgaagcctttggccgtgtagttgattcaatgcttacccaacacatgaagtggttaagaaaagctaaggaacaatactggcgtcatgactatccatcacttaactttgtcgcaacctcaactgtcttccaacaagaccacaatggttacactcaccaagacccaggcatcttgactcacttatatgaaaagaatcgtccagaccttgttcatgagtacttgccatcagacactaatacgcttttggcagttggcgacaaggctttgaaagacagagaatgcatcaatgttttggtaacttctaagcagcctcgtccacaatggttctcaattgaagaagctactaaattagctgataaaggattgagttacattgactgggcttcaactgatcaaggctataagccagatattgtatttgcttcaactgaaactgaaccaactttggaaagtttagctgcaattgatatcttgcacaagcgtttcccagaccttaagattcgttacataaatgtagtagatgtgatgaaattaatgagtcctaaggataataagaatgctatctctgataaagagtttgatcgcttattcccaagtgacattccagtaatctttgcatggcatggatacaagactatgatggaatcaatctggtttgcaagaaaccatcataatatacatattcactgttacgaagaaaatggtgatattactaccccatttgacatgcgtgtcctgaaccaccttgatcgtttcgacttggctaaggatgctgttgaaagtattccatcattggcaggtaagaatccagacttcatcaatgaaatggatgacttgcttgctaaacaccaccaatacattcgtgataatggtaaagacattcctgaagtcactgagtggaagtggacaggtcttaagtaaaaaataaagtgtctgggaaaaaactaactcttagaccataataataggacgatcaaaattcttaagtgagttttaatcgtccttttttcttttaaaattaaataaaaacggtcttttggtcattttctgttccaatatttgcttatattcatcatcatgaaggctattccaacatcggtttcaactttctttttgcctcttagatgtgtttgccttcttcgctttgaagaacttcttttgctttttcttttaaatactgccagttagggttatagcgtacttgacgctggcgaccgctagctgtcttagctaattgttccagttctgacgtaagcttcaactgcctggcccttcagcttatcatgatacttttcgacagccttgcgccaaacaaaagtgtagcggttagcatcagcttcaattttagtgccatcaataaaaacagccccctcgttgatcagccaacagattggtaaagtagataaagctcttcttaaccagttcattggcatgactgctgtgtggtatactggtcgacctgttttagcagggtgtaaagcagaatagcttctggaatcgaatccacaatccagctgatagcattagccaagtgattgctgggaatggtaaaatccaaattgagtgttaaagctgtttgacctgtgatatgatttttgtacatattagtttccacctttttgttttaatgaaataagaggccacaaatgatcacattttttatggagaaatttaaaatgttaaattttagatcatatgaagacgcagatttcgaaaaattatgcaacatccacgatcaagcgcgaaagcaagaattaaaatttgccaatcttgaagctgcatttattccattcaaaatagcatcaaagaaagagcaattatttgaagactatcaagtttacgttgcaacaaaagaaaataaagttgttggtttggtcggatttaacgaagaagagcttggctggctctatgttgatcctaaagttcaaggacaaggtattggtagtaaactgattgattttacgcttgaaaattcgaccaggccattttatttagaagtgcttgagggcaatcctgcacaaaagctttatctcaaaaaaggtttcataacaattaaacatgaaagtggcaagatgccaggtaatgaatcatttagtgttgaagttgacctaatggaatataaataaaacatcccaatcaggtgtgttttttgttagacttataaaaaatgaagctagtcaataaagtattgtcttgtcattagaaagtactacatatgaagtatatttcatgaagtccgcttcatattttagggatgatgattatcaataataaaattaaggaataccgcaaaaaacatcaacttacacaacgcgagttagctgaaaaagttggtgttacagaacggacaataatttcattagaaaagggtcggtacaaaccatcgattgttttagcttataaattagtacaattttttgagacagatattgaaactttattttgcttaaatgagtatgtgaagaatgagcaagccaaaggaaggaatgcttacaattctttttgcgattctatcagtcatacagctcttagaattaatttatgatgttgcaaatagaaaaagcgtcaattatattcaagatgttatttggttaatattgggcatctgtttgacagtcggttatttctatagtactaaatatatcggtatagccaagattgaagaagatgatgaacgcgataaatttattcaaactaaaactaataatcaagcattcaatattttacagtgggtcctttttgttttaggtgcagtaacgataataattgatgttaatctcggccaaatgggattagattctcgtgcaatggttattatagttgtaggcgttgtattaatctttttatgggcattttcttggattttgcaattaatcttaatgataattaattatttttgcaattgagactacaaaaaataaagcgactggattagctccaatgtcattaagttaagacattgacaattaatattagacttttaaagcactgatttaacatttaattggttaaattggtgcttttttcgtacaacaaataaggcatagcacagattctgcttttttaagctacgcgatataaataatatacagctgatttgggcttaatatttctcttgtccttgcggcctggtctaattggaatggtataatagctgatctgaataaggatccgttcaaaatcttgcgttaaagaagaagccaaatacatgctctgaataatcaagcatgattgcttgaaattgatggcatattgatacttgcaatgcttttgcggaatataggcctgtgcatcaatttgactgattgcattaaacataatcatatgggcataaatttccatttcaataaatttatcttgtttggaatggaactgtacactgcctaaagaatacttcaatttcttgaaggaggtctcaataccccaacgcagatgataaagctctttaattctttttagcggataattttttcgatcaagattggttagcacaacttcccattcttctttgcctgatttggcatcattaattctaaatttgcaggctcgaaattttattgtgcataactcgccaaaatcccagcttagatcctgggtatttttagagcgatacttaatatattggcgataatgatgctggacatggtgaatattctcactggctttatgcgtgatgtagtaatagttagaagtagttaccaggcaggaaatctcacgatcacattcttgatcaggaaatgtcgttatttctttaactccgccttgtccagccttagttcgtattatgtaatgacagttaggcaggcgattgcagttttcaatcatattgaaactagtgtagccacgatccattgttacaatatatggaccacaattcaaagctttaagcatttgaacagccgctttgcgttcatccatttctgatttaggctgaaaaatacaatcctggtaggtattattcaatagatcatataaggcattaacgtgaatttgacaatagggtttctttttatgagaagaagcttgtacaatgttattcgatttcggattccagatttgattaaagtcagagccatcaatggcaaacaaacggtagtgatgatcaaaaagttgaatattaaatagattttgattaaaaacagtcagaatatgtttaaaacaagcaggagaaagctggcttttgcgttgaacataggcagaagtactaactactttatcgttctttttagttgcatcttcgccaaaagctctaaagagttcactgtttaaattctgaccttgcatgttaattgtagttttaaggactgtcgctgcatctaaagtgcgtttcctggtaaaagcatgaggattattaataaaatcgtgaatatgatccccagtattattgataatttgatcaagacgttctagaatattcttatgaagggctttcataattaacaccatctttctggcaataattttgaaggtttaaaatatataatatataagataggcgaaaaggctggtcttttcgcctttattttatacaaaaaaagagatcgaatccaaatgattcgatctctaaaaaagcacccttaattgtcaatgtcttaacttaatgacattggattagctctggtcgcttatttaaattttagtatggcatttctttaaaaaattagaatatcgatctttttcaccgtttaccttccaatattaaccattcaccgaaatttttaaatttaaaatattttttcgtctatactgataagcaagaaaggagaaaaagggatgaaggtaaaatttaacattgataatcaattagcgggagaaagtgctgaattttggttaaaaaagatgactaataaattcagtcaattgggtaaagaattaagtggtgaacaagacacgatttggtgcagttatgatgatgaaattattcctgtgaagtttgaaaatatttatttaattcaagtcgaacaagagcaaactttaatttatgacaaaacacagagttacaggtataaagggcaattatatcaggttaaaaatattttgccacataattttttaatagcgtcaagaagtgcaattattaattatcaaaaaattgatcatttggaagttatggatggtggcaatattgatgtcattatgaagaaccaaatgcgggtacaaatttctagaagaaaaattaaagacttgaaagagaggttagggttatgaaaagaatggaatctttcttggtaagtggaataagtggcatgggaattggattaacttggtattcaatagtaactttatttcaaacgggaacgaattggaaaaatgctcaaattccgtttacaagtttgctcttttatttgattgtctcttttgtgatgggagcatttttcaatttgacaggattgatttttgaacaaacgcaatggtcactacgaaaacaaattattgtaaacttttttgttagctatgttgccttttttgcttttgaattagtgattaatgatttggctttatcggttcatttcttcttagtaattactggagtatttgtcttgatgtacttgctcgcttatggtttgtactttttacaattattgcgagatgttaaacaaatcaatcaaaaattgaaagaaaagtaaataatcaaaaacgatcaagcctaaaaatcttgatcgttttttcgttggttagataaaaattataaactgtcttgaatattatcagctaagtagtcataaagcataccatgctttaattgcttagtatcaactcccaaagcttcagcaattgcataggcaaaggcccaagcggtagcaggaccacggcttgttaaaattttatgctctttatcagtaacggtgattttctctgaaaaatgagcacttggggcatcttttaagcattcttcttcaatgcctggataacaagtgaagtccgcatctgccaaaacaccatagcgagcaagagcacgtggagcagcacacattgcggcatcccacttgccagcttcatgacgcttaatcatcagatcacgtaatttttcattatcgcgtaagttagcagaaccagtcatgcctcctggaaaagcaaccaaatcataatctaataaactgtcatctacaactttgtcacaagtgatttcaatatgatggtcaccatctacttttttacttattaaacctaccatatcgcattcaacgttaagtctacgcaatacgtcaacaacgcttaaaccttcgacttcttcgcaaccgtctgcaaatactacagcaacttttgtcataaaatcatcctttctataactattttaattatctacttacattagatctaagtaaaatgaaagatctgctaatttgcttaaatgaagagtaggatgaggtgaaattggtatcttgtcttttttaggtgccagccataatgattttagattggcattttctgcaccttgaatttcttcatccagattagttccaattactaaaactgtgtctggatcaatatctggattgtctttcagaatcttaaagaaaatatttttgcttggcagcttgtccgtaaaatcatcggcgaaataagcattgtcaaatgaagaaagcaattctgtaggtgcaaggcgcggttcgatttgagtgcgcttttctttagcaagcaaaatcaaatgcagcttgccactgacttcatcaataaagtcgatggcgcccttgactaacctggtttgatccttcattgcatcatcaaaaacagttcgcgttttagaaagatcttcttttaaaaatgtagataaagctaaatcgatttgatcatcgctagataaatttttaaattctttttctaagctagtgtagcgtagtcgctcagctggtccccagtctaacccataatgttttaaagtttgccgcagcgcagttttttctgctaatttttcatttaataaactgccttctggaatgaaaattaaggtttcaaatgtagtcatgaataaacttcctttgtgttagttcctattagaattataatgaactagacaattttaggaaaggaattaaaaaatgacaatctggaccgtaattttcttattattaggtggcgttgcaggtggcttattatcgtcagtggcctcaatggcatcacttgcatcatacccagttttgctagcagtaggaattccaccagtatttgctaatgtaactaatgatgcggcgctaatttggactagcatcggttcaactgtatcttctactaaggagttaaaaggacattggaagcaagttttgttctataccatttttacagttgtgggatcaattttgggttgtattttgcttctatcttttcctccaaagatttttgaaaaagcagtaccattctttattgctttctcaggattgatgattattgtttctggtaaacaccatagtttaaatactaagacacagcctacttggcttaaaataatttattttctcgcacttttagtcatggggatgtatacaggttactttggtgcagctggtggagtcatcgtactagtacttttaacttacattaccaatgataaatttattgttattaacgctatcaaaaatgtgatttgtggttttgctaatttagtagccttgattatatttatgtttacctctcatatttattggcttcaggcaattcctttggcaatcgggatgttcattggtggctatattgggccagctattttaagacgagtaccggaaaagccagttcgaattttcattgcaagcttggccttcattcaagccggttacttcttttatacggcatatctgcaataagtttggtacaatattaagcaatgaaaagggggctaaggttgatggcaacagaagtttatttggtacgtcatggtgaaacaatgtttaaccaattggacaaagttcagggttggtgcgattctcctctaaccgtgaaggggattaacgatctaaagagaaccgctaaggccttgagtcaagttcactttgataacatgtattcatcggatttgaagagagcaattgataccgttcacttgatgaaggatgctaatgtggtctcggatattggtaaaattaaaaagctgcctgaatttcgtgaggtcttctttggaacttttgaaggcgatgatattaaccagacttgggaacaagtagcactagccgcaggaattgaccatgaagatgatgtaactaagatcatcaatcaggtaggcttgcgcaaatttcgtgcagcaacaaaaaaggctgatccgcgtcatttagcggaaaatcaggatgagttagatgagcggatggtacgggcaattgacgttttgcgcgatttaactaaagatgaacaaagagttttgttagttagccatggtgactttattaaaactttgtccataaaatattggaataagagtaatggcaaaaacgatattgtttttccaaataatgggagcgttactcgtggaattttgcacgatgacggttcatttgaaattgttgattataatgtagatgctgaagagctataaaagtcctactgccgaagtagggccttttttggtacactgataacgaaaggaaaatattttatgaataaagatcatacaactaagcgttatgtcttcgtaactctactgaatgttgttattactattgctgaatttataggtggtattttttcaggttcattagcactgctttcagatgcatttcataatctgagtgatgttggtgcaattattttatcttttgtggcgcacctgattagtcgcaaaagtcgtaatcagtttaagacctttggttatgaaagagctgaaactttagccgcttttactaatggcgttatcttgatcgtgatcagtgtggttttgtttgttgaagcaattcaacgtttctggaagccggaacatattcacggtggcattatgctgattgtctcgattattgggctggctgccaatattatttcaatgctagcaatgcatagcgattccaaggctaatttgaatgtacggtcaacttttattcatatgttaagtgatgccttgtccagtgtagcggttgtaattggtgcgatcttcatttacttctggaatgtaacttggcttgacccagttttgactattttagtttcaatctttgttttgcatgaagcttatgaaaatacaatgaaagcagccaatgttttgatggaatctaatcctgatatcgacttgaatgaagtgaacaagattgttttatcgttccccatagttcaaaatatccatcatgtccatgtttggcgctacagcgatgactttattatgatggacgcgcatattaatgtagccccaggattaagagccgatgaattagagcagctataccaagatattggacaggagttacaaaaagagttaggtattaatcatattaccttacaagcagagtgcgagcgtggcagaaaagacaagatgatcgttccaggccacggtattaacgaagattaggtgaaagaatgtttaatgttaatatttttacagcgattattgtattgattatgggtatttatgacatgtcctatgcttttaataggcgtaagcaacctaccaataaaggcggcattagagcctttatggctttaggaattatcttcacgatcgcaggaattgttatgatcgttagagtattaatgaagtaaggaatcttagaatggctaaattagtattagttcgacatggcgaaagtgtggcaaatgctgccaatgtttatactggctggaacgatgttccgttgactaaaaaaggtgaagaacaagcagaaaaagctggtgaattgattaaaaccatttcggattttgctcccacccacattcatacttcagtcttatcccgtgcaattgtgacagcaaatatagtagccgatgtctgcaatttattatggctaccgatgactaagacctggcggctgaatgaacgccactacggcgctttaaggggccttaataaggacatttcacgtaaagtatttggtgtggaacaagttctattgtggcgacgtagttttgattcagttccacctaagcaggggtcgccaatgattgatcgccgttataagcattttgatcagcatttgatgccacgggcagaaagtttacatcaaactcagaaaagactcatgccatattattatgatcatatcgcatctcgattgatgaatggtgaagaccaactgatcgtagcccacggttcaagtttgcgtgctttgataaaaaagctagagcagattaatgatcatgacatcgtaaaactggaagttcctaatgcggaaccgattgtttatactatggatgatcacttaaagattattaacaaacaaattttacgtaaataatgttaaaaatgcaccttagtgcatttttttaatgctctaaatgaggttttacacatatctatggtaaaatctattatgatttctagtatatttagtttggagtattaggcatgcgtaaattatttttattacgaggtgcacctggctccggtaaatcttcttttattactcgccatcacttaaatccttatgcgatcagtcgtgatcaaattaggctactattggcggatttgacagtttactatcaagaggatgcggatgttttacaccaagtcattccgcggcacgtaactgtgcgtactgagcaaatggtggatcaccttgtagaacacaagatggaatatggggaaactgttattgtggatgggacgcatatcgttccaagtgcgattgaacattttaagccttgggtagacaagtatcactatgaatgctttgtagtagatctgatgcaacatactaccttagagagtttgcttaagcgtaatcagactagaatgcattacgattgggttaagcctgaagtggttaagcaaatgtatcgttcttatgaagcacatccagaagtaccatactgggcacataaagttgtgccaaatcagatggatcatgcgttgtcacagcgtgagacaaatttagatcgttatgctcatgtgattgcggttcctgacatggtagatgaagaagattttccacatgtgcatatctcgaacttttatttttcatttaatgacaagtttacagaaaagtatggaacttatcgaaatgtagtttcaattgctaaaactgaagatgaagcagttaagcagttcaagttgccatattttgtctttaagtttcatcacaagcactttttgatttcagcttatccaattcgaaatgagatgttggatccgatcagaaaggttaagggagtttggacatattcaactggtttgtataatgtagcggattttgtgaaagaatttccggaaaataaaaagcaacatgtgcatcagttcaacttaagtaagttagatccaacccgcttattacatatttggtaaaaaagacgtagttagaacattttatctaactacgtcttttgtgtaatttacttatattttgttttacttcaatttgccggccttagctaaaacttctttagccttttcaagtgaatggtgttcttcacgataacgcttgatgtcatagccatcaacatcggttaacttgctaagtctatcatcaaggtctttgaattctttttcaagatccttaatgacgccttcttcatcttcaacgtaaacatactcattttcatcagctttggcatcaatcttagcatcgtattcgccgacttttctagcatgtttcaaaatagatttaatatccttaatcgtttcatgttgtgcagtacggtgacgacgatcaggtactgaatcttcaattctagcaaggtgactttcagcatcctcaatcttcttagaaattctatttaaggcttttaattgtctttttgaataatctgtcaagttttatacctcctagataaaatgataagctctactaaatgcgctttcattgtaattagtaacgaaggtataagcaagaattaacacttatgaataaaaagagttacgccttaaaaacgtaactcttagaagttttggattaatatttaaaagctaaggcacccattggatcccatggcaataattgaattgggttatctttgccttcatcgtaagccttcttaagatcttctggtaagaatttcttgttaataactgcttggtaaacaaatgaatcaaaccaagaatcactcattacgaagtaacccttaaagccagttttttcaccccatgagttttcgatcttccatttagttggcttaccgtcaacgatatcaacaccggtaatcaccatggcatggtccatcatgctttcaccagaatcaagcatgtcggctttagacatagtgaagtcagcatcaaataattgatcacggcggtaaaggttagtatcaagaagtccagcacggcgttcagaatccttaactacgtttgaaccgaaccaaacaacttcgccactcttcaattgtttaatgattaagtccttcatttcatcaactttaaggtttaagtggcgaacttggcgaccgccttcaacgttacctaagtattcaactgagaataccttgtggaaaggtttgtcgttagttggagcattgatagttgagatatggtttgctaaatccatgccaacgtacttgtcaaagaattcctttggggtaatgtccctgtcaatatggtaattcttgtcatcatcgcggtattcgaagttgaacttctttggtggaacacccaatgaagtagccaaaatacggaagacatcgtttagcatttcttccttgcgagcttgtacttcatcttctgacttgccatcttgaactaatttacgtaactcaagaccatctttacgaagcaaagtatttaaagtgtcgtttaatgcacttgaattagtagcattagcagtttctggataaacactcttaggaacgataccatatttttcaataataccgcaaagcatgtcccattgaccgccgtcttgttgaggagtcgcaaataagaatgaaactttacgatcgcccaagtccttatcagcagttgcgatcacattttcaaagaaccagttagacttttccaatttatcccagaagttagtgtaattttgagataattcgaagtcctttaacttaaatttcttttgtaatgggtgacgcatagtgtttaaagcactgaacatccagcagcgaccagactgcttttgatcggcagggttacctgtatcaatttcgattgagaaggttggatctaggtcgatcttagtttgtaagttttgactagctttgtagataccgttttcttgagcagcgtgactagccacatcaaaaacagggtggttagctaagtcttgttcaaatttattaatagtatcattgttgatttcttttaccataaaaaaatcctcctttataagtacttaaattaattttatcttattcaaaatgagtcgtctaataatcttatcgattaaatggacgatgataccaaattttgtgaaattgaggatgctgggtgaagtagtcaatgatcataggatcaagcggcaaaatgggtaagttagtttcttgagctaattgccaaactttttgcatttgtttttcaagcaaatcctgactattaaattgtggattaataaaaaaatggttcattatccagacattactgtctttgcgagcgattttatctaaggtaacgctagataatagtatgtcttcttcattttttatagtgaaaatttggtgcgtatcttgcttattcataaaaaattccccggatttaaaattgaagtgcaacactaagtgttaaacaaaaaggccatgaagacctaaacttgaagtgacgaaaaatcaagaaaggaagatcttcatgaccaattcaaattctagcatttctaagcactatcatcaattaaccagcgtacaacgtggacaaattcaagcaatgctggattccggcataacttcccgtactgttatcgctcaagaagttggctgccataagtcgacaatcagtcgcgaaatcaaacgcggaagcgtcctgcaaagagacagcagctatttattgtatgagcactattacgctgatactgcacagatttattatgagaagcgtcgcaaaaactgctatcagcgcaatccattgaagcattatgctgtctttttgagaatgctctccagacgctttaaagctaaatttgatgccaccagcatcgatgagttcgttggtgaattcaaaaggactatgccaggctacccttgtcccagcacaccaaccgtctatcgctatattgatcagggcttgctggacataagcaatattgatctgcctatgaagctcaaaagacgcaggaacaagcgtcatcacagccatggcggtcacgctttgcacaagaagcatcttggcaattccattgaacagcgtcctaaggaggttgaagacagaaaagctccgctgcactgggaaggagatctggttaaaggcgtcagacgcaagaatcagcctgctttaatgactttgactgaaagaaccacacgctttgaagtagttatcaagattcctgactatcgggcaagcacatgccaaaggctgcttcaaaaggagattgacagacatcctgcctggtttaaatcaatcacgtttgacaatggctctgagtttgcggatatgaccaagatcaagggctgccagatttactttgctcacccatattctccatgggaaaggggcaccaatgagaactgcaatggtcttttgcgtcaattcttccctaagggcaagagcatgaaacacaagtcaaaagcttatgttcaacaggcaactgatgccattaaccacaaatatcgccgaatcctccaatatcacacagcagaggaactcttcaagcaatatatctcttcataacctaactgttgcacttaatttgacaattcaggttcataaaaaattccttttttaaaaaataatctcattttttttgcgtaataaataatagagagctatttattttgtgttgactaaaaacattgtaaaatagataactgtcaaaataaaagataaatggagctttggaatgaaaacacgtggatttgaagtagtcaaaaagtatcaagatcaggaaattaatcttcctcgcagacagaccctagccagtgcaggctatgacatcgaagcggctgaagacattactatccctagcatttggcgactaaattttgtgcgaatttttaggttgattagaaatggacaccagctgtatgagcgcgactatgagatggcggatcagattttaaagccgttgttagtgccaactggacttaaagcttatatgccagaagatgaagtgttgattttagctaatcgttcatctaatacttttaagcgtaatctagctttgccaaatgggatcggcgttatcgatgcagattattacaataatcctaacaatgagggcgaaatttttgtacaaatgattaattatggcgtacggcctttgcacatcaagaagggagaccgtattgctcaaggcatttttatcaaatacttgaagaccgacgatgatgatccaattagtcgaaaaagagttagcggctttggatcaactaatgaaaagaagggtgattaatggctagagtaaaaacacaatataagtgtcgttcttgcggctatatttcggcaagttatttaggccgctgtcctaactgtggtgcctggaatcaatttgaaaaagaaactgaagaagtgcaaaagcgttctactaaggcaactgctagtcgtttgattcagaagactggattaaatgaaccggtaaagctggataagattaaagctgaaaaagaagaacgaattgtcactaaatctgaggaattaaaccgcgttttaggtggtggtattgtaccaggctcactagttttaattggtggagatcccggaattggtaagtcaaccttgatgttacaaattatgagtgacttatctgaaaaatataaggtgctttacgtttcgggagaagaatcagctaaccaaatcaaattgcgggctgaccgactgggtgtaggtcaaagtaatatgctcttatatccagagactgacatgcatgatattcgcgaacaaatcaatgatgttaagcctgactttgttgtaatcgactccattcaaactatgaatgaaccaagtcttgattcgatgactggctctgcctcacaggttcgtgaagtaacaagtgaattaatgaaaattgccaagatggatgccattacagtttttgttatcggccacgttacaaaagagggtgcgattgctgggcctaagatcttggaacatatggtggataccgttctctattttgaaggggatgaacaccattcttaccgaattttgcattctgttaaaaaccgttttggagcagcaaacgaaattggaatgtttgaaatggttaatgaaggcttaagagaggtaactaatccatcatcaatttttctggaccaaagattacctaattctactggctctgctgtggtggtatcgcttgaaggaactaggccacttttagcagaaattcaggctttggttactccgacagcttttggctatgctaaaaggaccacgtcaggtattagttttaacaaagcttcattgctgctagcggtgcttgaaaagcggggaaacttaatgttgcagaatcaagatgtctatttgactgcaactggtgggattaaattgaatgaaccagcaattgatttagcaattgccatggcagttgcatccagttataccgataaagaaatttcgccgacagattgttttgtaggcgaagtgggcttaactggtgaagttcgccgagttgataaaatcgatgcacgagtaaaagaagcggctaaagtagggtttaagcggatctttattccacggcataatatgtattctggattaaaagatcatggcattgaagtaattcccgtttcgagtattccccaagctttaaaattagtttttggctagcattaattgaattcttactatataacgagtaaactaagattgtttgaatttactattttttgaaagaggcatgaattttggctaaagaaaaaatccgtgtaagatatgcaccaagtccaactggtcacttgcacattggtaacgcacgtactgcactttttaactatttattcgctcgtcataacaagggtacgatggtcttgagaattgaagacaccgaccaaaagcgtaatgttaagggcggttctaagtctcaaatggaaaaccttcactggttaggaattgactgggatgaaggtcctgataagggtggcgactatggtccttatcgtcaatcagaaagaaaagaaatttaccaaaagtatattgatcaattgatcgatgaaggtaaagcatattactcatacaagactgaggaagaacttgaagcacaacgtgaagaacaacgtgctgcaggtgttgcacctcactatacttacgaatatgagggtatgactgctgatgaaattaagcaagctcaagatgaagcaaaggctaagggcttaaagccagttgttcgtatccacattccagaaatggaaacttattcatgggatgatattgttaagggacaccttgagtttgaatcagacactattggtggggatttcgttattcaaaagcgtgacggaatgccaacttacaactttgccgtagttatcgatgaccacttgatgaagatcactcacgtacttcgtggtgatgatcacgtttctaacacacctaagcaattagttgtttatgaggcacttggttgggaacctcctaagtttggtcatatgacattgatcattaattcagaaactggtaaaaaactttctaagcgtgacgaatcagttcttcaatttattgaacaatatcgtgatcttggttacttaccagaagctatgtttaacttcattactcttcttggttggtcaccaaagggtgaaaacgaaatctttaacaagcgtgaattcatcaagcaatttgaccctgcacgtttgtctaagtcacctgctgcttttgaccaaaagaaacttgaatggattaacaaccaatacatcaagaaggctgatcgcgacactttgcttgatttagctttgaacaacttgcaagaagcaggtcttgttgatgagcatccaacaccagaaaagatggaatgggttcgtcaattggttaacatctactcagtacaaatgtcatacactaagcaaattgtagacatggctaagattttctttgaagaagctaaggatctttcagacgaagaaatcgaagaaatcaagaatgatgatggccgtggtgtaattgaagaattcaagaagcaattagacctcatcccaagatttacttcagttcaaatcatgaacgctattcaagcaactcgtaaggctactggcatcaagggaagaaagctctttatgccaattagaattgctaccacgcgttcaatggttggacctggtattggcgaagcaatggagcttttaggtaaagaacgtgtattagaacacattgatttaaccttgaagcaaatgagtgctaataatctttaattagataaattgaaaaagaggctgcaaataaatgcagcttcttttttcatctgctaaaataaaaattagttattttgacagaagggacaagtgttagccgtgagagtttataatacactgacgcgtaaaaaagaagaatttaagccattagttccaggacatatcagcatgtatgtctgtggaccaacggtgtataactatattcacattggtaatgccagaagcgcaattgcttttgacaccattagacgctattttgaatataagggttatgacgttaagtatgtttctaactttactgatgttgatgacaagatgatcaacgaagcgagagctgaaaaaacgactgtacccaaattggctgaaaagtttatcaatgcttttttggctgatacgacagcgctaaacattgagccggcgactttgcatccccgtgcaactcatgaaattaatgacattatcacttttgttaaaagcctaattgacaatggctatgcttatgaagtagacggcgatgtttattatcgtgccaaaaagtttaagcattacggtcagttaagtgatcaaaatattgaacagcttgaagagggtgcttcagagcacattaacgatacagaacaaagccgcaaagaagatccaatcgattttgctttgtggaaggcgcaaaaggaacccgatgaaattggttgggattcaccatggggcaagggacggccaggctggcatattgaatgttctgtcatgagtaccaaatatttaggcgatacgatcgatattcatggtggtggtcaagaccttgaatttccgcaccatgagaatgaaattgcacaaagtgaagctaagaccggtaaaaagtttgttaattattggctgcataacggttttgtaactgtcggtaaagatcaggaaaagatgtctaaatcactgcacaatttcgtaacagtgcacgatattttaagggaagttgatccgcaagtactgcgcttcttcatggctagcgtacaatatcgccgccaaattaactattctgctgaaaatttagcacaagcagctacaattttagatcgctttaagaatactgtgactaatattaattaccgtctagcagatgatacagctagtgaagaatcagccgaattagcacaggcgattatggcaactaacgaaaaatttgaacaggcgatggacgatgactttaatgtccaaaatgctttaacagctatctatgatttgttgcctgtagttaatgccaacgctaatgctgctagagctgacaaacaagaattgcaaaagtttaaagagaaattagctagttggttattagtgtttggcgtggatactaataagctttgcgttaaaaatgctggctccaatgacgatgaaattgacgctttagttaaaaagcgtgatgaggctcgagcaaataaagattgggcaactagtgatcaaattcgtgatcaattaaaggaaatggggatcactattcaagataccccacaaggaactaggtggactcgtgactaaaataaaaaaactagcggaagaggatgttaatccggatactttaaatggacaaactttagcctatttaggggatgcagtgtatgaagtaattattcgcagacacctagttaaaggcggtatcgttaaaccacaagtattgcagcgtgaagcgactcactatgtttcagctaaagcacaagctgcgttggtaactaagatgcaagatgaagaaatgttaacggatgatgaattagctgcttttcgtcgtggacgtaatgctaaaagtcatactaaggctaagaatactagcttgaaaacataccaattatcaacaggctttgaagcaatgattggttatcttgatttactggggaaaaatgatcgagtggcagacttaagcaagtggtgtattgatactgtagaagaggacgggctgaaaaattatgacttcaaataaagattttgtctttggacgccatgccggacttgattatttaaaaacacaaagtgccgacaagattaataaggtttttttgcaacacggtgtacaagaagaatttgctaatcaagtttatagtttagctaaaaaaaagcgtttagttgttcaagacgtgcctaaaaataagcttgatcgtttggttgctggtggcaatcaccaaggtctagttttagcaatttctagctttgaatatgcagatttagatcagttgctggacaagtatgatgcagaaggtaaagaaccatttttattaatgttggattctattgaagaccctcacaatctgggatcaattttgcgttcagccgatgctactggcgttgatgggatcattattcctaagcgtcacgcgactggcttaacttcggtagtagctaaaacatctacaggagcaattgattatgtgccagtagcgcgcgttaataatttagttcaaactactaaagaactgaagaaacgcggttactgggtctttggaactgatatggcaggtactgattatcgtgaatggaatgcccaaggcaagactgtactggtaattggtaacgaaggtaaaggcatcgccccattacttaaaaagcagatggatcaaactattactttgccaatggttggtcacgtacaatccttaaatgctagtgtggcaaccggggtattgctttatcaagcttataatagtagaaatccattagtaaaataaacagaaagtagacaaaagtgtgagttttgtctacttttttagatacataaagctcatttctgtccattaaacatgtgttttcttctcaaactcaggggacagtctgtattctttgaggtggaggataaattgaatgattaatgaagagaagctgattaagaaagtacgggcaggagatgaccaagctttagaaaaattgtttcatttatatgagccgttagtaaattcaatcgtgaagcaattctatttgcatcattatgatcgcaaagattgggatcaagaggcaatgattgtttgttatgaagcagcactagttttctcgcctcaaaagggaaaatttagcagtttatataaaactaaattgtttaatcatgcacggaccttggtacgttacaatatggcacgtcgcaggcaaatctatagtcaatcgattccgctagaaaaggcggacattcaaggaagcgtgaatgaaccatgccgctctgaattatcgattccagttgatgagacttacaataattttgttaatagcttgtcacacgttgaattaattgcattattaaccataattggcgagataagtacagagtatgcgattgatcatctaaatattgaagcaatgaagctggtcagagctcgagcacgaactttacagaaaatgcggaaagtgcttttttgatagctgatcaaaagaaagtgcggtataataagtaatgtagaatattttaggaggtaatttaagatggcagacgaaattattaagactgcattgttagaccgtcacatgaaggaagcttttgactggagtgattcagatatgccagttagagatgccctttgggactactttatggaaaagaatggtagagataccatgaagacggaagaagatatgcttccatttttgaaagactcagacgataaaatcgaagccttcgttaacgaaaatcttaagaagtaaatccgactaaaaaacaatgttctacgcaccgtggtcacgcatagttttgaccactaagacagctaccttctccggtggctgttttttatactaaaattaagaaagaattttaaagatgaaatatataattggcatagacataggaactactgcgactaaaggtgtgttgtatggcgaagatggaagtgaagtagctaaattggcaatttcctatccattgattcaggaagaagcggggcaggctgaagaagatccacagcttatttttgacgcggtacagaaaatgatttatcaattaagtcagaaagcatctggtcaaattttggcaatttcttggtctagtcagatgcacagcttaattggcttaggtgaaaataatgagttactgacaaacagcattacttgggcagataatcgtagtagtgatgtagtgcagcgggcaaaaaagtcgggctgggcaagaatgatttatcagcaaacggggatgccgccacatccgatggcgccagtgtataaattgctgtggcttaaagaagaacagccaacactttttgcacaagtaaaaaaatggattagtatcaaagaatatattatttggggcttaactggaaaaatattaactgatacaactatggctgctggcagtggaatgatgaatttaaaaacgctgacctgggatgaaaagatattggctcagattgggctagatcaagttcaattgccgacaattgctgatcaacaatctactgtgggtaaaattattccagaatatcgtgctaaattgggtttaaatgatgaaactcaaatcgttttgggcgcaagcgatgggtatttgtcaacgattggtgtcggcgttttggatgagaaagattttgcattgaatgttggcacttctggtgcggttagagtaattgcaccgaaggcaattgttgatcaaaagaatcgctttttctgttaccctgttgacgccaaacattatttgcttggcggccctgtaaataatggtggaattgtgttcgattgggccagaaaaacaatttttggcccagatgaaacggcagaggacgtcttaaatgtggcacaaactgctccggctggaagtaatggattgttgtttcatccttatcttggtggtgaacgagctccaatttggaatgctcaagcacgtggatcttttgttggcttgacgcgaaatcacactaaaccgcagatggctagaagtgttttggagggaattgtttttaacttgcttggcgcctctcaaggattgcttgatcaagtgggacagcctcaagctttacgtgttactggtggctttgtgcaaagtgattttgttagacaattaatcgcggacatttttaacttaccagtgattgtaattaaaaatgagcagtgtggtaccctagcagctatgtttttagctaaaactgcattagaagataagccagacctggaaaagattaaaaagcgtactgccgaaagccaagtttattttccaaatccccaaaatgtagcgatttatcaagaattgattctcgtttatcgaaaaattgagcatgaacttgaagcctcttatgaagatttggctcagtttcaagataagcatccacagaaatttgagtaaaacaaaaaagacgcattgcgtctttttttcatagattgattaactattaagcattttcaatatcttcaacaatctgatcaactgtcatacgattgtctttcaaaatttctttcaaaggtacttgatcagtatagacacgtttttggccgtagttgagtactttaatatccttgtcgccaaggtaggaagctactttttcaccaaaaccgccgtccaaaatattgtcttcaatagtaacaataactttgttttcttgagtcaatttgtctaaagcggcagtgtctaaaatattagcagaaactggatttactaagctagcacctgtcttttcagccacctttttacctagcatatcgtacatatcacctaacgctaaaacagcaacatctttacctggtttaatgtcgtacttgatttctgaatagtcaacagcagtaatttctttaccttcaggaacatctttggtaggcatcttaattgctacaggatgcttcttttacttaatagcccattccatcattgccttttcttcggctaagttagttggagcaaggtagatccagttaggcaagttagaaatcattacttgatcaaacacacctaggtgagtcttacttgtgccagaaatgccaccaccagcaaccatcattacaactggtaaatcattagcggcaacatcgtgtgataattgatcaaatgcacgttgcaagaaggttgaattttcaaataaaactggagttgcaccttccttagccattccggcagcgaaggcaacggattcttgttcagcaattcctacatcatggtagttttcaggatatttgtttttaattctgtctaagccgaaaacgccgggaattgcggcattgatagccatgatcttctcaccattattgatgtgatcttcaagaacatcgagtgcaatagagctagcggtcggaccttcaggcattgctactgtcgtcttgtcagtctttaaatcgaatggcattacccagtggtgtgcttcttcgttgtcgattgcaggttgataacctttgcccttgagagtgttgatatgaagcaaaatagggtgatcaacatttttaactgctttaaaagcatcgatcattgattggatatcattaccatctgcgacataacggtaatcaaagcctattgcagtaaatggattttctttggtttcaccattagaatcacgtagtttctttaaagcagtaactaagccaccgacgttatcatcaattgacatttgattgtcgtttaccactacaactaagttatgcttttcaattgcagcgttgtttagcccttcataagcaaggccaccggtcattgaaccatcaccaattaaggccatgatgttttcatgtttgcccattaaatcgcgtgctttagccatcccagttgctaaggcaattgaggtagatgtgtgaccgacggcgtaatagtcatatgggctttcatcagggttgctatatggagttacatcttcatagtggtctggatcaagccaagcgagtgcacgtccagttaacattttgtgcgggtaagtttggtgggaaacatcccagacaatcttgtcctttggtgcatcaaaaacatagtgataagcaattgtagcttcaacgattcctaagtcgggacctaggtgaccaccttcagcggcatctttttctaagattagagtcctaatttcactggctaacttttccatttctggaagagataatttttttaaatcagcaggaccagaaattttattcaatagatattcaggatgtttatttattattatgtcctttctaacaagtagttacacttattatagataagcaaaaatcaaaataaaaatatttagttgtaattgagctcgattacttttagtaatgtaaatcagattattgacgtaggaagggacaacagtataaaatactgagtaagtatgtgtttttataaaagtttggaagtgagattatggcagtgaaaaaagcagccttagcctgcagtgtttgtgggtcacgcaactactcaatcaccgcaagtaagaatcgcactcagcgacttgaacttcaaaagttttgcaaacattgcggtaagaaaacattgcataaggaaacgaggtaaataaagctaatgattaagttttttaagagtgttggtcatgaaatgaaattggttaaatggccatccgcaaagcaaaatagacgtgatacagcaactgttattactagttcaattttatttgcggcatatttaggtgcacttgactggctcttcacttggttgactcaaagattaatgtaattgctagcataattagaaattatcagcgattcatgctataatattgacagctaaaagaaaacctctgtgggaggtttttttgtttacctaaaatttaaggagaaaaatatggtcgaaacagcacaaaagaaatggtacgttttgcatacttattcaggctatgaagacaaggttaagtcagacttgttgtcacgtgcgcaaagcatggggatgcaagactacattttccgtgtaatggttccagaagaagaaaaagtagaaaccgttcgcggcaagaaacaagaaattgaagaaaagattttcccaggatatgttttagttgaaatggtaatgactgatgaaagttggttcatcgttagaaacacacctaatgtaactgggttcgttggctcacacggtggtggctctaagccatcaccacttcttgatgaagaagtaacgcgtttgcttaagaatcaaggtcaacctgctaagaaaccagtagttaactttgatattggcgaatcagtaactattactgaaggtgcatttaatggcatggtaggtaagattactgatattcaaccagataagtacaaattatacgtatcagttgacatgtttggtcgtgcgactactgctgaacttgattatgatcaagttaagaagcttgacgaaaacgaataatatttagaatttttagttgtaattgtacccaaacgatgttattctaatacggtacgtttattattgtgggaggagaaaaaaggaaaattctccattttaaccgcatcacggaatcaaggaggttttgaccgtggcaaagaaagttattaacgtagttaagttacaaatcccagctggcgctgctaccccagcacctccagttggtcctgcattgggtcaagctggtattaacattgttggttttactaaggacttcaatgctagaaccgctgaccaaaagggcatgattatccctgtagttattactgtatatgaagatcgttcattcgaattcattactaagactccaccagcaccaattcttttaaagcaagctgctaagatccaaaaggcttctggtgaacctaataccaagaaggttggtaaggtaaccaaggaccaagttaaggaaattgccgagactaagatgaaagaccttaacgctgctgatattgaagctgctatgcgcatggttgaaggtaccgctagaagtatgggtatcgaagtcgaagactaatcctgttatttaggtaacaaattaggtgggagagttaagagaagctcgtttgaccacatatacaaggaggaaatcacatgccaaagcatggtaagaaatatttagatgctgccaagaaggtagactcaaataaattatactcagtagcagaagctatgaaacttgttaaggaaacttcatacgcaaactttgatgctactgttgatgtagcttacaacttaagcgtagatcctaagcaagctgaccaacaaattcgtggttctatcgttttaccaaatggtaccggtaagacccaaaccgttgtagtatttgctgaaggcccacaagctgatcaagctaaggctgcaggtgctgactttgttggctcagatgacttggtagaaaagatccaaggcggctggttagactttgacgttgtagtagctactccaatgatgatggctaaggtaggtcgtttaggtcgtattcttggacctaagggcttaatgcctaaccctaagactggtactgttaccatggatatcgaaaaggctgttaagaatgttaaggctggtcaagttgaataccgtgttgaccgccaagcagctattcacactcctattggtaaggtatcattcactgaagaccaattagttgaaaactttgacgcattacgcgacgttatcttacgtgctcgtccagcttcagctaagggtcaatacattaagagtgttgctgtttcagcaacctttggcccagggatcaagcttgatccattaaacttggactaatttaaaatagactattaaaagcctcgctattgcgaggcttttttctattcattgacctattattttcgaacatggtatcataaattgaacttacaaatctatatattaaggataatgtcatgaaaaagcattctattggaaaactagtcattatgttggtgctaatgctagcttttgttacgggctgtgctaataatggttctaaaatcactattgttggttcaagtgcaatgcagcttttagcagaacaagcaggtaatgattatcgcttaagtcatcaagacagcaacattgtcgtgcagggtggaggatcaggtacaggattgagccaggttcaagctggtgcagtccagattggaacctctgatgtttttgccgaaacacaaaagggaattgatgccaagaaacttcgtgattataaaattgcagtagttggtattgttccaattgttaataagggtgtaggtgtgaaaaatgtttcgcaaaagcaattgaaacagatcttcactggtaaattaacgaattggaagcaactaggtggcaaaaatgaagccataactgtgatcaatcgttctaagggaagtggtactagatctgctttcgaagatataattttacaaggaacaaaaccagttaagtcgcaagaacaggactctaacggtgccgttaaaaagattgttaattcaacgcctggtacgattagttacttgtcctttccttatgctcatgataccaatattcaaaagttgagtattaatggggtaaagccaactaacaaaaatattactactaataagtggaatatttggtgttatgagcacatgtacactaagggtaagcccaacaaacaaactaaagcgtttattaattatatgttaggtgaaaaagtacaaaaagatcttgtacctaagattgggtacctcagtatcaatgaaatgaaagtaactcgtaatagcaagaatcaagttacacaaataggaaaatagttcatggataagaaggataaattaaaggaagttgttgatcaagcaattgctagtcaacacgttccacacgttaaattaaaaaagatgggtccgactagtgttgatattgataaattaaccaagccatctaaagagactcatcaagaatattggggcaagggtttaacttacttggcaattgttttgattattgtcttagttgtctcaattatcggctttgtcggctatcacggcttggctacttttgtcagcgatcatgttaatgtcattcactttttgacttcaactgattgggacccgggtgagggcaagaatcatgttggtgctgcggtaatgatcgttacttcgttcttagtaactcttttagcagcattggtagccaccccgtttgcaattgcaatagctctttatatgactgaatattcatctaaaaagggtgccactttcttacagtcagtgactgaattattagttggaattccgtctgtagtttatggtttcttgggattaactatcatcgtgcctgtgattagaaaactatttggtggaacaggttttggtattttagcagctacgttggcgttgttcgttatggttttaccaacaatcacatcattaacggttgatagcttaaaggctgtaccaagtcattttagaaaagcttcaatggccttaggttctacgcattggcagactatttatcatgttgttttgcgagttgctacgcctagaattttgacggcggtaatcttcggaatggcaagggccttcggtgaagctttagccgtacaaatggttatcggtaatgccgtcttgatgccatacaatttggtcagtccatcagcaacattaactagccaattaactagtcaaatgggaaatacggtcatgggaactttgccaaacaatgcattatggtcattagcattattgcttttaattatgtctttggtatttaatttcctagttaagttaattggaaagaagggacaaaagtaatatggatgcaaaaaagaaagataaattagctacggcgattatctatattttggtaggaattgttgtattaattttggccggtatcctaggtgatatcttgattacaggtattccacatttgtcctggcgctttttgagttctgaagcctcatcataccaagctggtggtggggtacgtgatcaacttttcaattcaatttatttgttaattttgactactattatctccttaccaattgctttaggagcagcaatttatctagcagaatatgctaaagataattgggtgaccaatttgattagaactacaattcaaattcttagttcattaccatcaattgtagttggcttatttggttatttattgtttgtagttcaatttggctttggtttttcaattatttctggtgctttagctttgaccttttttaatttgccaattttaactagcaatattgaagaagcaatcaagggcgtcccacaagatcaacgtgaagcaggattggctttaggattatctaattggaaaactattcgcgggattgttttacccgctgctcttcccggaattttaactggaattattttgagtgcgggccgaatcttcggggaagctgccgctttgatctatacagcgggacaaagtggatcaacagtcaattatgcggactggaatccatttagtccaactagtccacttaatgtaatgcggccagccgaaacattggcggtccacatttggaaagtaaatactgaaggaattattcctgatgccacgattgtttcagcagctacttcagcgctcttggttattgtggtaatcgtatttaatttaggtgcacgttatttaggcaataaattgtaccgcaagttaactgcagctaagtaggtgaaataatgcaagatttaaaacctagctatattaaaacttttgcaaatgatgatttggaattatcaactgaagatttaagtgttctttatggcggtaaggtacaaaaattatttgatgccagtcttcaatttaaaaagaacacgattacagctttgatcggtgcttcgggttcaggtaaatcaacatttttacgttcattaaatcgaatgaatgatcgagtagcaactgttaacggaaaaatctggtttcatggtttagatgtgaataagcctaatatcaatgtttatgaattaagaaaaaacattggcatggtttttcagcggcctaatccatttcctaaatcaattagagaaaatattgtttatgctttgaaggcagatggacataaggatcgggcagaacttgatcgagttgtagaagaaagtttgcgtgcggctgctttatgggatgaagttaaagataagctggataaaagtgcattagcattgtcgggtggtcaacaacagcgtttatgcattgctcgtgctttagctgttaagccagaaattttactactggacgaacctgccagcgctttggatcctgtttctacttctaaactggaagatacccttaagcagttgaggagtaagtatactatgattatggtaactcacaacatgcagcaagcctcaagaattagtgattatactgcattcttccatttaggacatgcaattgaatataattcaacggcagagatctttactaatcctaagggtaagattactgaaaactatattcagggaagttttggataaaatgacaacaataatttcagcaaaagatgtacatctaagttatggcaattatgaagcactgcacgggatcagtcttgattttaagaaaaaagaattaacagctttgatcggtccaagtggttgtggtaaatctacttttttacgctgtcttaatcgaatgaacgatgacatcgaaaacattaatatcacaggtgaaatcaagtttgaaggccaagatatctataattctaaaatggatttggtcagtctacgtaaagaagtcggcatggtttttcaacagccaaccccattcccgttttccgtatatgacaatgtggcttatggcttaaaaattgctggtgttaaagacaaagagctaattgatcagcgggtagaagagagtcttaagcaagctgctatttggaaagaaacaaaggacaatttaactagaaacgctcaagcattttcaggaggacagcagcaaagaatttgtattgctcgtgcgttggctgttagacctaaagttgttttattagatgagcccacaagtgcgcttgacccaatttcaagtagtgagattgaagagacactgatggaactaaagcatcagtatacttttattatggtgactcacaatttgcagcaagcaggacgaatttctgatcagaccgcctttttgatgaatggcgatttgattgaagctggtccaactgaagaaatgtttattgcacctaagaaacaaatcacaagtgattatcttaacggtcgttttggttaaaattttgaggtaaaaagatgcacgaaatatttttggatgaactgaaaaaattaaatacacaatttatggaaatgggtgtcctcgtcaacgatgatattgaccatgctacccgtgcttttgttgatcatgataaaaagactgcgcagtcaatggttgatgatgaagaaaagattcctacagaatcaattaatattcaaaagcaagccttaaaattaatggccttgcagcaaccggtagctactgattttagagttgttatcagtattttaaaggccactactgacttggagcgaattggtgaaaatgctatgagtattgctctggaaacaatcagagtaaaaggtaatcctcgtattccagaagttgaagaaattatttctaatatgacacataatgtgcgacatatgttaattcaagttttaactgcttacgtgcaagatgatgaaaaaatggcacgtgaagtggctagtcgtgatagcatgattgaccacgactatgtaagagctcgtcaattgatcgttgatgtaattgaagatgatccttcgcgtgcaatggcttcatcaagctattttgtagttacccgtttacttgaacgaatcggtgaccacattgttaacttggctagctgggtggtttataaaactacgggtgaactagaagaactatctaattcaactgaaagtgaaacgatttaaataaagtaccgtaaaaagcggtgctttttttgtaataaaaaacagttgatacgcgtggtgctagttaaatcgttctagacaatatgccatattataagctaaaatagctatttctagccgctgttgaaagcctactggacttcttgctcgattattctcagcgttgtaataactaagcaaagaaaagtcgctttcaatgctttttctaattgccatcatcgcttactattgcgtggaccttgaagccataataatagactttcttggttgctttataaccaatatcagctacgccccgaaagatcttgacacgataattgcaaacaggctggcaaactggcactgggaaactatcaataatcaaaaattctccagctgtctttacttcttgattccaagcctgacggatacaacgaattagaggcaagagcattcgagctcgacggttaaaacgagaatgagataagccaacgaagaatttacagaatcttcgttgagattcaattccaatttcagtttgccaaatgagcatcgctaagatagaactatcaggaagcttggtctgatcaacatttttacgatgtttaagtccatcaggcgcataaagcttatatagcgagcgacaaatcacatttaaccgattaaaactaacttgtaaatggtgagaaaaacgcttaagcttgagatagttcaattagatcagactcttttctatttaaattacctacaacttttattaactaaaacgatttaactagcaccacgcgtataattaatgaatatttcaaaaactgtattggcgttataccaaacaattattggtgaaaaacagaaacgcttaatcaagacagtagatgcttatttggacattaactacggtgataaagtttatcagataattgatcaagttaaggaacgtaatattccaattttgtcttttggggatatagcagatcaaaacaatacttactcaaactacactgtttttggcaatgatcaagttgacgagatggtggataaaattaatgaaatcatcaataaccaaaataaataaaattatcttttgcattttacagcaaagcttgctataataattaactgtaaattctacctaagactcgggtggcatgacgcctcaaaatcccgccgaggccagaagatgatgaagatttttatgctccatgtctttcggcatggagtttttgcttttttaaggccttatagaatttatcaatgtgatcatggaggtgaaataatttgagtaaagctgctattgctgaaaaagaaaagttcgttgatgcatttgctgaagaacttaaagctgctaaggcaatcttggtaattaactaccttggtttgactgttgaagaagttactaacatgcgtaaggaacttcgtgataacgatgttaagatgaaggttatcaagaacacctacttaagacgtgctgctgctaaggctggtatcgaaggtcttgatgatacttttgttggaccaactgctgttatctacactgataacgctgatgacgttactgaacctgcacgtatcgtttctaagtacgaagatgactttgacgttatcgaaattaagggtggtatgcttgaaggtaagttgacttctaaggatgaaatcaaggaacttgctgctatcccaggccgcgaaggtttgctttcaatgcttgtttctgtattacaagctcctgtacgcgactttgcatatgctgttaaggctgttgctgaatctaaggatgaagactcagctgaataataaagaaatttatatttaatatctaaattctaatttttcggaggatacttaaatggctttagatactgataagattattgaagaattgaagggtgctaccatccttgaattgaacgaccttgtaaaggctattgaagacgaatttgacgttactgctgctgctccagttgctgctgcaggtgctgcagacgcaggtgctgctaagtcagaattcgacgttgaattgactgaagcaggtcaagaaaaggttaaggttattaaggcagttcgtgacattactggtcttggccttaaggactcaaaggaccttgttgatggtgctcctaagaacgttaaggaaggcgtttcagaagacgaagctaacgacatcaaggctaagcttgaagaagttggtgctactgtaacccttaaatagttacagcccaactgggcaactatgaataagctctttgctatgtgcgaagagcttatttttttgtataattaaatttatgatgaaagatatagaaagaagactaacgccatatcaatgggtaatggccattttagctattatttcgatttttttgattattttagattttgctgcggttattaatattgatgaaccgactagtaaatggttctggatcaatagtgcaattgtagtatattttgcaattgattatttttgtggcttacatgcagcagaagacaagaaactatatttcaaaactcacatttatgacttgctgagtattattccaatggggttattgtttatcagcttaaatatttttaatttatctgggctggtatcagatttgcggcttttgcgtttgattcgattagctggtttgatgggaaaattacgtaatatttttcatactaatggcctactctatgtaatcttttttacaattacatttttgttggtaggagcggaagcattcgcaatcactgaacatgtaacgctggatactgctttttggtgggtcatttcaacagcttctactgtcggttatgatgcaatttttggcaaaacaattccaccgcatagtattgtaggaaaattcgttacattagtaatgatgcttttaggaattggaatagttggtatgttaacgtcatcgattacttcgtatttgatgaggagaacgaatggcgcgaatacgttaaaaacgcatgataatattcaattaattttgaaaaagcttgataatttagaaaagcaaaacaaggatttggctgatcaaaacaaaaagatgcaagcacagattaatgaattgaaagatgtacagaatacaacggagctgcataagataaaagaatggtttgagaaaaagaaaggttagttaaaatgagtgaagaaaaaaatcaaatgtattttgcgactgatcctactgccaagcatgatcaacatgttgttgattatcatgtggataatattgatttgaaattcacaacagacgcaggtgtcttttctaaaatgagggttgattatggctcaggcgtattgatcaaggcaatgaaagatgttgtttttcctaaggataatatcttggatgttggtaccggttatggtccgattggtttatttgcggctaagttttggcctgatcaaactgtagatatggttgatgtaaatgagcgtggattaagcttggcaaagcagaatgcacaagttaatcacatagataatgtaaatatctattcctctgattgttatgaacatgtggataatgataaaaagtttggtctaatattaacaaatccgcctattagagcaggaaaaaaagtggttaatgagattttactgggagcaaatgagcatttggttaatggcggtatcttattagtagttattcagaaaaagcagggagaacctagtgcgcgtaagctgatgaccaatacatatggtaattgtgaaattttaacaagagataaaggctattatatcttaaaatcaactaagaaataactaaataaaaaatgcttgaaagtactattaaataagcattagactttataaaagtgctttcaaaactggatttatcctcgtataataatcttgtaaatatcaagagtatgtgaagaggataattattatgaaaaaggcttggaaatacattgttgcagtattgattgtaattgttggtgtgtttatgttaggtatgatttccggtgataacgagactgctgctccagctggaattgctgcattatacttgatcttgtcaggaatctttttctaccacaactttagaaatcgtaacattgaaccattgtaaaaagtaagcagctagtcgcaaatcaatgtcattaagttaagacattgacattatatcgacagcttttaaagatcgaatcattttgattcggtcttttttctttttaaaataaaaagtgagcagagtttatttgcctttctgctcactttcgtcatattatctggtctttcatagaaagctgtgcctcttatgaaatcccttcactcaaatattttaaagctgatggatagtattatcaataaaatcgctgacaacattcacgatttctctgtatctgatcaagcttttactcgctgtcgtaagctcaattccactgatttgattaagttaattcttaacatgggagctggcagcctgaattcggaaatttttcatgcttttcctgacataaattctagaatgactgcttcggcttttgaacaacaaaaggctaaattaaagcctgaatgctttaaagaaattatgttagaacttagccgggcaaataatgtactgcaattattagataatcaatacttagttgttgcgattgatggctctgattttgatcaaccttttaatcccgaatcagaaaatatttttcgaggtaaagatggtcgaatatactgtcaacttcatgtaaatgctctttatgatgtcttgaataaattatatttacttaaacttcccacactaaataagccagtaatctcttgatcttgcttggctttaggcttctatattatttttgctagttttctttaacaatttttgcatgtatttgggtaaacgattgataaagtcagccgtgaattcagctatttgtgcttcactggcatgaaagacttgctttacgctggccagcattgcatcagtaatcaattgcaaggaatggctaaaagtaatgtccgccagctcatcaatcatgcaatagaacagctcgcctagcgtgcgttcatcttcatcgtcccgcttggcaactgacataagcatgtagcgagtaaaaactatggcaacatgagcggtcaaagcatcgtaagacaggccatgatattccgtacttagttttagataacttttgcaagttttgaaaaaaacctcaatatcccaacgcttgccgtagttgcggataatttcatcttcgctaagcgacatgtcggtacaaatgattgccagccaatccttgcgattggcacggtttctaacgcagacaatccgtgcatctattttagcaccgtctttgtcctggcgtccgactttgactgggattgacagcaggtagcgagaacggccgcatcgctttttacagctgcgataaatctgtttgatgtttttgcgttctccctcaaattcatatttgattttggagctaaccttaaccatggcaatcacatccagcttcctttgcttgagctggacgatttgatgtggatttgagaaccagctgtcaaacagcacgtacttggcttgatgacctgctttcatagcttggtcgattaaattaaccatcacgtctgtgcctttagtccgggcaagcatacgtctttggccagcaatggtgcgctgatcaaaaactttattttcgccaatcatattctgtagcttctgagaagacagcagcactgaattgattggcatgaaagaagctccatcagtccagcccagggtcatcatgcgaaaacctttcttgtaagtcattgatacatggtcaaaaactttggcgactaattctgttttcttgaagccggtcctagagaagtaggaatcatcgacaacaaagcaatcagcccgtttttctgaagtcaaagatcgcaagtggttattaatgatttgcgcagacagacgtgtggtgaagtggagccaattgacgtgaacgttgcgcataaaacggtaatatgagttcttggaaaaattttcttgaaaatgatccattttcagctgcatatataagctgcggtcacgaaagacattgcttaaaacgtaaagaaacaagctgaacaggctaatgcctttttccttgcggaagccacattttatcaacagcttgatcacctgaaacttcttgatgaagctgatgattgagtttgaaaatagttgttcattttgttggtcaggagatggtaaaatagacattggcacaagcctttcatgcaaataaattatgttttggtcaatataattatagcaatgaaaaggacttgtgccttttatatttgtcaaaacacgcagaatcacaatgaaacaagcaattttgcgtgtgggaagtttaagtatttagacatggttatccaacccagacaaaaaatggatgaacgtgaggcagccttaactatgttaaagaaattagcccaacaagaaaaagatttcttagtcctgatggatcgtggctatattagctttaatttaattgaaaattgcaatcgattaaaacattgccactatgttatgcgatcaaaatccggagatggtgcttttaaagaaattgtagctatgtcgaatcatgaatacgatattgacttatcatgcagagtaacttcgtcacattattattatgtcacccataaagatacagaaaagtttcttcacctgattcttcacaaaaagcatcactataaagctgttcgttcaaaaaataccagagatcaacgctgggattttgaggatatgtgtgatgttagatttagagtttgtaagtttagaatcaatccaccaggttcagacgatgagtgggaagtcctcatcaccaatttatatcgaaatgaatatcctctagctagaatgaaagagatctatcatcttcgctggggaatagaaacttcttttagggagcttaaatatgacttaagcggcatacagtttcattctaaaaaagatcaatttgtttatatggaaatatacgcccattttgcaatgtataatgccgtgagtttatcaataattgcgagctcaaaaccgtatactcagggaaaatatcaatatcaaatagattttaaaatggcctgttgtatctggcgacgatattttaggagactgtaaaatagtttgtgtaaggatgaatgattccttaaatttatttctttaaacattagaaaaaggagttcctttctcgtatgattggtttgaacacaaaaaacacatacagaaagaagaactccttcatgaatgattttaccaaagattttgctcaagctctattcaatccagacaaaataaatgatttattgcgcaaagaactacaacaggctgttaataacttgctagaagctgaattgactgcctttctgggctatgatccctatgccagaaatggctggaatactggcaactctagaaatggtgcttatttccgcaaagttgatacgcaatttggcccaattgaagtgcaagtgcctcgggatcgcaacggtcaatttcatcagcacacgctgcctgactacaagcagcactcggatatcttggaaagcatgattatcaagctttactccaagggcgtgaccaccagggaaatagccgatctaattgaaaagatgtatggcagccattacagtccagctcaggtatcaaatatttccaagcagatgattccaaaggttgaggcttaccacaaacgcaagctaagcgacaagtttttctgcgtctatttggatgcgacataccttcctttgcgccgagaaacgtttgagcgtgaagcagtctatattgccattggcattaaacctaatggacataaggaagtcattgactactgcattgctcctagtgagaacattgaagtctggacagagatgcttcaaaacatgaagtccagaggcttgaagcaagttgaactctttctttctgatggtgttgttggcatgaaaacagccttggccaggacttatcctaaagctcattttcaacgctgtttggttcatgtcatgcgcaatatctgcgctaaagtacgcgtcgacgatcgtgaaaagatcatgaacgaattcaaacaggtgcatcaacagacaaacaaagaagaagccacagctgtcctgcatgacttctataccaaatggggcaaggtttacagccatgttatcagaagcttgaaagacatagaaccagatctgctggtcttttataactatcccaagcagatcagagcttcaatttattcgactaacatgattgaatcatttaacaatgtgatcaagcgcaaagctaagcctaaggcagagtttccaactgaacagtcgcttgatgcttttattggtattcaggcaatgagctacaatgaccgttatttcaatcgaattcataaaggctttggtcaggttcaggacaccttagaatcctactttgattaaaagataaataaaaaagtcaatcaacgagagagattatttacacaaacttcttgacagtctctattttagtataagtgataattcagataaaaacttcacacaattactgctggatgtggcattttatttaacgcctattcgaccaggaagaaaagataaacgaaatctaaaagttaaattagtagttggctttccttatcgtctagcagcttgaactaatttaaacgactatcttaagatggcttatttgtgctatcaaaaaagacatttatcgaataaaataattcgataaatgtctcaaaaagtgtcatcagattagtcaatgtcttaacttaatgacattggtcgcaaatagctgcttttttgatacaataaataaaaacgatgaattgagaagtgataaaatgctgtctagcgaagataaaaggaaatacatgcaattagccattgaccaggcaaaagaagctgaaaagcaaggagaggtgccgataggggcagttgttgttgatcctgatggccgcgtagttggtactggatataacaggcgtgaacttgatgaagatgctacccaacatgcagaaatgattgcgattaaagaagcttgcagtaagttaggcatgtggcgcttaattgactgcagcttattcgtgactttggaaccatgcccgatgtgtgcaggggcaattattaattctagaataaaagacgtttatttcggtgcacttgatccaaaagccggagcttgtggatcagttgtggatttatttagcgtagaaaaatttaatcatcatccgcatgcaattcgtggactgtatcgtgatcaatgtgcacaaatgctaaaagattttttcagagcgattcgtgagaaacaaaaagcagctaaattagctcaaaaagaagtataaaatcagtaatttttaaaacaagatgctggtaatatttactgaaatacgttaacatagttgttgggcaatgtttgacctctgaattgtgtcaggaccggaaggtagcagcactaaggttgttcaggcatgtgccttttttgttagaatattaacagctcttagctcttcgagagctaggagcttttttacttaggaaagagaatttatggcttatcaagcgctatatcgtaagtggcggccgcggacttttgacagtgtgattggtcaagaagcgattaccgataccttaaaaaatgcgattaaacgtggtaaggtttcccatgcgtttcttttcgcaggaccccgcggaactggtaaaacatcttgtgctaagatttttgctaaggcattgaattgtactaatttgcaagatggcgaaccatgcaatgagtgtgctaactgtattgcagctgatcaaggttcaatgccagatatcatggaaattgatgccgcttcaaataatggggttgatgaaattcgtgaaattcgcgataaggtaaaatatgctccaacggaaggtaaatacaaggtatatatcatcgacgaagttcatatgttgtcgatgggagcttttaatgctttgctgaagacattagaagagccaccagagcatgtagtatttattttagcaacgactgaattgcaaaaagtgcctgcgacaattatttctagaacgcagcgctataattttaagcgaattttcaaagaagaccttgagaagagaatgaaatacattcttgatcaagaaaatattaaatatgaagataaagctttagcagtcattgctcaagtagccgatggtgggatgcgggatgctcttagcattttggatcaactgttgagttacgagaaggaaagcgtcaactatgatgatgctttgcagattacaggctttgcagatcgagaaaatattgaaaaaattcttttagctttgttaaatcaggatgcaggtcaagccttgcagtttacacaagatgagttggctaaaggagctagttcaaaaaacattttagatgaaatcatcgatctaactactaagagtttattaatcgtcaaaaccgatgaaaataaacaggaaacttttttaacaaaagactttattgaaaaaataaagagcgtttctacagatagttattatcgattgattaatttggctaataatgccttgaatgatttacgctatactaatcagcaacagataccactggaagtgttcttagtagaagcaagtagtactgcaccagtgcagataagcgctgccccagctaagacaacaccagctcaacctgcacaaggtaatactgatttgcaggctgaactagcagcgctgaagaagcaagtcgttgatttaacacaaaaacttagtgaagtatccaataagccaagtttatcaacaaatcaggtatttcacttggatactgcggtacctaaagtggctcctaagcctgctgttaaaccaaaagagaagcaaactaaaaagccggttagaaaagtcaaaaaaactacggcagaaaatcgcaaacaagtatatcatgttcttgaaaatgctactcgaaacgatttagagacaattaagaatgtctggcctgatttacaatctgttttagctgtctctgaaaaagcactgcttgatgtattagaaccagtggctgctagtcctgaacaagttgtcatgaaatgcaaatatactttatggtttgaaaatgcgagcgcagataatgatctgttagggcgcttaacggactatattgaaaagtttgctaaacattcttacggcattgttttggtgccagataacgattggctggcagttagaaaagaatttgttgaaagccataaggatgagctacttgctaagaaaaagcaacagattgagattcaagaagaaaagtcagatgaaccagaagttgatccagaagtgattaataaggcaaaggatctttttggggatgcagtcaatattaaagactaaagtactatgagcaatgattataatattaaagttttaaataaagaaacaacattacagatcttactagaagatcataattctttgattcgttttggagatggagaattagatttaattagaggagcaagtattccgtatcaagattatcaaccggaattagctggttcgctaaaagagctcctgttagaaggcagcaatcgccgtttattagtaggattatctgatgtttttgaaaagttagatcgctataatgattattgccgtaatttttatcaaaatagtttcttcccgaataatcatgacttgttaagagaagttgaattgcaatacaatgtatacgtttctactttcttttcacggccatatattgatttagtagataaaagtcacgctaaagattattttgctaaaatgaaacagctttggcaggatcatgatcttttaattgtagaaggtaaatatagtcgctcaggcgaaggcatgacttgttttctaatgctagatcaattagtagactcatttgtccgccaactaatgcatatagtcgcaaaaaagttattgaagatgaaattattaaaaatgcagctaataggttgattttactgatgttaggtcctactgcaaaagtgattgtggctgatttgatagctcagcttaataatcaaatgattgatatagggcacatcgattcagaatatgaatggatgaaaatgggcgtaactaataaggtgaagataccgcataagcatactgctgagtttaattttgatgataaacaagttaaactagagaaagacgacaattttgataagcagattattagtataatagaataataaaggagaaaaattatgagtagaagacctaattttggtggtatgggcatgggcggcatgaacatgcaacaaatgatgaagcaagctaagaagttgcaagcacaaatggcagaagagcaggaaaacattactgctcaagaatttactggtaagtctgccgatgatttagtagtagctacctttactggtgaccgcaagttgaaggacatcaagattgataaggaagcaattgatccagacgacccagatatgttacaagatttggtaattgatgcggttaacaagggcttggccaaaattgatgaggcaactcaggcaagcttaggtaaatacacgaaaggtttgatgtaattgcaatatccattaccaattgctcatttaattgatgcttatatgaagctacctggaatcggtgaaaaaacggcgactcggttggctttttatacgatggatatgcctgatcaggatgtcgatgattttgctaagtctttagttcaagtaaaaaaagacattcatcaatgtccgatctgtggcaatattaccgaaaaagatgtctgtgatatttgctctaatcctaatcgcgatcaaacaactattatggtagttgaacaaccaaaggatttgatggcttttgaggaaatgggcgaatatgacggactttatcacgtgcttcatggtgttctttcaccaatggatggaattggaccagaagagatcaatatcaagtctttaattacgcgtttgcaaaaaaatgatgctgttaaagaagtgattttggcgcttaattcaactccagaaggcgaatcaactgcgatgtatatcagcaaattaattaagtcagctggtattaaggtaaccagattggccgctggtttgtcagttggtagtgacattgaatatgctaattccattactttaaagcgcgcagtgcaaggaagaacggcattataatggctaataaaaagcaagcaaagatcaaagcaatgggtgatcaaaagttggtagccgagattgaaaagctacaaaatcaaattgcattagagcaagatctcgatcaaacaactttagatttatccgaagataattatgtgcaaaatcgaatcttaaaggcaaagtatacttttttgtataatgaagctcgtcatcgaggcacaagatttagtggtattactaatgctattacccagtagaaaaagaccgaatattggtctttttttattttgaataaataaaaaatagtaggactgttaatctctatgaaacttatgtagaatagacatatggaggattttatgagaggttattttgttagttttgaaggccctgatggcgccgggaaaagtacagttttaaaagaagtattgaaccaaattggttcagagcttgagacacaatatcttgtgacgcgtgaaccaggcggttcaaaaattgcagaaaaaattcgcgacattattttagatcctgctaacgacaagatggacaataagaccgaagcgcttttatatgctgcatcacgtagtcagcatgtggaagagattattcgtccagctttaaaggaaggcaaagtcgtattttcagatcgctatgtcgatagttctttagcttatcaaggagcgggacgtgatttaggaattcaggaagttaagcaaattaatgattttgcaacggataaattagatcctgatcttacttttttcttagatcttgctcctgaagtagggttgaaacgaattgaaaagctgcgtccgggtcaggaagatcgtttggaacaagagaatcttgcctttcataaaaaggtttatgccggttttctcaaggtaaaagaaatgtatcctgaacgtttcgtaactgttgatgctacgcagccaattgatcaggtagttgctcaagttattgcaatattaaagcaaagaatgccagagttattttaaggattgatttagatgaagttagtaattgcaattgtgcaaaaagaagactctaatgatttacaacgggcctttgttcaaaatgattttcgtgctactaagttagcaacttcaggtggttttttaagtcaagggaataccacctttttagtaggttgtgatgacgacaaggtagacgatgtattaaagattattaaggaacagtcccgagcaagagaagaaattgcaacaccacatatggtttcaactgggtatgaaattacacagcctttgaaagtgacagtcggtggtgcaacttattttgttgttccagttgatgagtttaaacgcttctgatgattgatcttagtaatgttgggaaaaagcaaacccaatttttaaaaatagcatatgaccaaaaaaagttagctcatagttatctttttgttgatagcgatgaggcacgggcattgaatactgcatactggctagcttgtttgtttaattgtactggtgaaaataagccggatggcagctgtcaaaattgtcggcaaattttgtcaggtaaccacccagatgtattgctagtagcgcctgatggaaaacagactctagggattgatcaaattcgtcccttaaaagaagaattagccaaaagcccagttgaaagtactcgccgtttcttctttattaatgaagcacaaaagttaactttagctgcagcaaacggtttattaaacttactagaagaaccagtagcgccagtagttacgattttgattactaataatagcgatcaaattttaccgacggtgcgttcacggacccagatcattaattttgacaatggtgagagggctagtggtaggactgcagtcttactggagaatggtttttcaaaagcagagattgaggaactgggtaatcttgataaatggaatcaggcaattaaatatttttatcaagaaatgctggaacacaacagcttagcacttgtcagtgcacacaagctagctgctgatgctaagctagtgtcagagcagcgttacatcttgtttcagttaaaattattggccgagcaagatttgcgtaatcctgctaaaagaataatggcggcgacaatgcttaagaatttaattgaaatagacaaaatgcgcttgagtaacgtaaatttacaaaatgcgttagattatctcgccttaaaatggaagtaggtgtttagattggatccatattcaaaactgaaaaagattgaagaaacaacagaaaatatgaccaagacgattgccagcttggaaaatgatattttagaaacattaaaagaaaacacggagttgaaggtagaaaaccaattactccatgagaagctggacaagttaacggcaaatcagcctgcacctgagactaaaacgcagagtggcttggaatcattaaagaagatttatgattcagggtaccacatttgcaatatgtactatggctcgcatcgtgatccaagtgcagattgtatgttttgtcttgatattttggacaattttggcgaaaaaaagggcaagaaaaaggacggtagataatgaaacgtcaaagcagttatgcaaaagatgaaggaaagctttatttagtgccaactccgattggtaacttggaagatattactattcgcgctaaaaaagttttaaccgatgcagattatgtagccgcagaagatacaagaactagtgggattttactggaaaaaattggggttcataataaaatgatctcttttcataagtataattccaaggagcgggcgccggaattgatcaagttgatgaaggaaggtgctgtgattgccgagattagtgacgcggggatgcccgtgatttctgacccaggttatgtattagtacaagaatgcattaagcatgatattccggttgtaccacttcctggtccaaatgctttttcaactgctttgattgcttccggttttaatcagccatttacttattatggctttttaccaagaaaatcatcggaacagaagacctattttgcacagatgcgcgataatagagcaacatcaattttttatgaagccccgcatcgtctagcaaaaaacctcaaaacattggctagtgtgctgccaaaagatcgtcaaattgtagctgcacgtgaactgaccaaaatccacgaagagtttatccggggtagtgtggaagaagttacgaattacttcaatgagaatgctccacgcggggaatttgtgattctagtttcacctaatacagaagcgcctaagcaactatcttggacagaattaattgacttagttaatgacttggttgaaaaaggtgaatccaagaaagatgcaattaaacaggtagccaagcagcatcatgtttctaagaatgaattgtatgatcaatatcaccaggactaattatgaaatataccgaagaatatcaaattgaatttaaagattgtgatgaaaatcgccgattaaagttaccagcactagttgatttgatgatgcaggtttctgagcatcaattaagtcaaggtggtgctgggactgatgacttggttaagcgtggtctaggctgggtcgttactcaatatcattttgagattaaagacctgcctaaaccgggtgatcaagttattctaagtactgaagctagcggctataatcgtttttttgagtatcgtgattttggcgttagtacgcaagacggtaagccattagtgactgtaaaaagccagtgggtaatgctcgacttgaagaagcggcatatggtgccagccgatactaaaatgatggaagattggggtgcaccactacttaaaaagatgccacgttttccaagattgcgtccgcaaaccgaatacgagcaaaagcgttcataccgtgcgcgttacgatgacttagatactaatcatcatgtaactaatagtcattatttcagttggtttgttgatatgttggatcgtaactttttaaaagaacatattgttacagcaattgatattaaatttgataaagaagttcattatggtgagagtataaattcttgcatggacttggttcaatatgatattattattattacatctcatgcaattgaagcagaagatgggacagttaaggccgtctgtgaattaagttggcgtgagatatagtaacaacatgacgctattagtcgtttttaattagggaggaatcggtcgaatgaatacaaagaaaattttacgaacggatttacagcaactagtctttttaggtattgttgttgcaatgaaaattattctaagtcagttttcttttggtccagtaatggttaaagtgggactgggtttcattgggagtgtgctattaggatatctctttggtccgctctggggaacaattggcggtggaattagtgatttaatttcatctgcactttttggcgatcaaggtggctttttcattggttttactttaacagcaatggcaggcccatttatctacgccctgtttttatataataagccagttaaaatttggcggattattgcttctactattctggtgactgtaattgtcaatattggcatgaataccttatggctacatattatgtatggtatcaatttcaatgcggctttgatccaacgtttacctaaggagatgatcgttccttggattcaaatggttatcagctactttgttttacaagccgtttctcgtgttaaaataaaaaagtgatttaaagcgaaaagagaaaaatgcctgaattgtcaaattaagtgcaacagttaggttatgaagagatatattgcttgaagagttcctctgctgtgtgatattggaggattcggcgatatttgtggttaatggcatcagttgcctgttgaacataagcttttgacttgtctttcatgctcttgcccttagggaagaattgacgcaaaagaccattgcagttctcattggtgcccctttcccatggagaatatgggtgagcaaagtaaatctggcagcccttgatcttggtcatatccgcaaactcagagccattgtcaaacgtgattgatttaaaccaggcaggatgtctgtcaatctccttttgaagcagcctttggcatgtgcttgcccgatagtcaggaatcttgataactacttcaaagcgtgtggttctttcagtcaaagtcattaaagcaggctgattcttgcgtctgacgcctttaaccagatctccttcccagtgcagcggagcttttctgtcttcaacctccttaggacgctgttcaatggaattgccaagatgcttcttgtgcaaagcgtgaccgccatggctgtgatgacgcttgttcctgcgtcttttgagcttcataggcagatcaatattgcttatgtccagcaagccctgatcaatatagcgatagacggttggtgtgctgggacaagggtagcctggcatagtccttttgaattcaccaacgaactcatcgatgctggtggcatcaaatttagctttaaagcgtctggagagcattctcaaaaagacagcataatgcttcaatggattgcgctgatagcagtttttgcgacgcttctcataataaatctgtgcagtatcagcgtaatagtgctcatacaataaatagctgctgtctctttgcaggacgcttccgcgtttgatttcgcgactgattgtcgacttatggcagccaacttcttgagcgataacagtacgggaagttatgccggaatccagcattgcttgaatttgtccacgttgtacgctggttaattgatgatagtgcttagaaatgctagaatttgaattggtcatgaagatcttcctttcttgatttttcgtcacttcaagtttaggtcttcatggcctttttgtttaacacttagtgttgcacttcaattttaaatccgggaaaagagaaaaatgtataaaatgaaaattttaagtgtttcgacagctactaatcatttgagcgtggccttgaatgatggtcaacaaattattgttgagaaaaatgaacgagatgagcgtaatcatagcgaacatcttgatcctttgattgatgaaatcttaaaagataatgatttaagcttaaaagatattgatcgttttgcagttgctattgggccaggttcttatactggactaagaattggaatcactactgttaagatgtttgccagcattttagataaagaggttgtaggaatctcaactttacaagctttggctaaaggcgttcaagaagacgctttggtaattactggtttagatgcaagaaatgacaattattttgcggccggttatttaagcggtgctgtaccagagaatgtcattccagacggtcattacaatatcgacgttttaattaaggcgattcaagattatgcggccaagcatgaagttaagaaaattgtttttgtgggctcaggtcttgaaaagcaagatgaaaaatttaaagctttgaatattccatatgtttatggaactgaagaagagaatgtcatccatgctgggctaattggacaattagctgaaaatgcggttccagttgatccagataaattattgccacgttacttgcgtcgaactcaggctgaagtagactggcataaaaagacaggcaaaccattcgagccagatagtcattatgttgaagaagtttaatcaatttttccatcaacagttaaatcggattgatatgagttttaccccgtttattgcgaatgtaaacggtaagagactacaaattatgcaagctacagatgacaatattcctgacctgcctgtattagaggagcaagtttattcaggtcggacaccgtggaataagttttcatttgagcgagaactagagaagcggcataattgtctttatttggtagtgtattatgaatcgatgctagttgcatttattggtgcgcgttttactccagaagagacgcatattactaatattgcagtagcgccggcttttcaaaatatgcatattggtcgttacttaatgcaattgattattgatcgggcgcgtgaaaatgacagtgattgcgttagtctagaggtaagagtagataatgagattgcccaaaagctatatcgttccttaggttttgaaggtaccttcattcgtaaaaactattaccatgatactcataccgatgctatgaacatggttttatggttaaaaccacatcagattaaaagaaagaagtttacgttttgagtgaaaaaaatgttcgcattttagcttatgagagttcttgtgatgaaacttccactgctgtcattaaaaatgggcgtgagattgaaagcttaatcgtagcaacgcagattaagagtcatcaacgctttggtggtgtagtccctgaagttgctagtcgtcatcatattgaagtggttagtcagattactaaagaagctttggctgaagctaattgtacttggaaagatatcgatgcaattgctgtgacttatggccctggcttagttggtgctcttttaattggtgtaagtgcagctaaggctgcttcaatggcaacgggtattcctttgattggtgttgatcatattatggggcacattatggcagctcaactaaaagatgagattgaatatccagctcttgcattacaggtttcaggtggacatactgaaatagttttacttaaggatcctgttcattttgaaattatcggtgatacgcgcgatgatgctgctggcgaagcatacgataagattggtcgtgttcttggggtaaactatccagcaggtaaaactatcgatgcctgggctcatgaaggcaaggatacctttaacttcccacgagcaatgatggaagatgatgactatgacttctcattctcaggtttaaagtcagcttttattaacacttgtcatcatgctgatcagattcatgaaaagttgaataagtatgatctggctgcaagttttcaagcagcagtaattgatgttttggctcataaaacaattcgcgcaattaagcaatataagcccaagacctttatcatgggtggtggggtagctgccaaccatggcttacgtgatcgcatgagtgcagaaattgctaagttgcctaaagcagaccaacctaaggtgattttgccagatattaagttgtgtggtgataatgctgcaatgattggggctgctgcgtataatctttataataatggtcaatttgcggatttgactttgaatgctgatccatcacttgaattgccatatgctaagagcatgttgaattaaatagaataactttttaaatcaaatacctagaacgattatttctaggtatttttttctactaaggcatggtccttaggatcttttaaatctaaggcgattgattccttgcctgcgttacagattctaaagtattcgctagaaccatctgcgatatatggccccatgtgacgcgtgtcatcgcctgtttttctttcgatatgaattacccgggcaccactatctgcgagcattctggtacaagtagggcctgagaggacgtgggtaaagtcaataacgagcatcccgcttaaaggataaggtttgtttttatctaaatgactgttttttgcttctagctcagcataattaggttctgtcatagttgtacgctttctattttaaaaagaaaaagctgttcgaagtgaacagctttttgatgagaataaattaattattcacccttgataacttcagtacgtggattcttaggaccttgagccttagaaattacgccttcttcagtcaatttttcgatttgatctggatcataaccaagtgaagctaaaatttccttgttgttttcaccaagatctggagcacgcttgtagttagaaagtgagaatggcaaaccaatagtcttgaacttaccacggttaccaccttggtcgatggttacgatagtaccatccttgttcaagtccgggccattttcaatttcgtgccagtcaagaactggacctacaggaatacaagcagcaccaagcttcttagttaattcatacttgtcgtattgcttagtgtagctttcaattaatgggtaaatttcttccttgtgtaattgacggttgtgccagccatcaaagcgaggattagtaatccattctgggtgacccatagtgttggcaattgctgcccagctcttgtcactgttttggataacgatgtaaacataagcgttaggattagtttcccaacctttagccttgtaagtccgaccgataacttggccaccttcagtgttctcagcacgaggaattgccttgccccatttccagttagggtaaacagcgtagtgaggaagggcacctaagttgtctaacattatttggttacgcaacttgatacggcagaggttcaatacagcgtcttgcattgactggtaaacaaaagtaccttcactggtgtgttcacgttgaagaagggcagctaagataccaatagtaaggtgcatccctgggtttgagtcacctaaagtagcagctgattgagtaggaacgttggctttgccttcgttccaaccagtagcagaagcagcaccaccagcagattgagcaactggttcaaaggccttaacgttttcaaaacgtgaatcttcattgagcccttcaatgatgcatagatcaatcttgggttcaaagcgtgaagcttttcccaaccaaaaccgttacgatcagctgaacctggtgcaatgttttcaacaaagacatcagccttcttagccaagtcgtacataatctttttaccttcatcagtcttgatgttcaaagtcaaagacttcttgttggcgttcaattgcaagtagtaaagactccatgaatcttgaatatcaagtaattcatttctagtagggtccccagtgttagtacgttcaatcttaataacttcagcaccaagccatgctaaaagttgagtacatgatggaccttattgaacttgtgtccagtcaacgactttaataccttttaaaggtgcatattcattttcttcagtcgtgattaattgtccttatcttcaagttgtgctaaatctaattctgggtttaagttaccaatgtgaccagattccttacccattgattcaggaatttgagcatcaataattgaaggattacctgattcgtaggccttttcaagagcatccttcatttcagcgtagttacttacacggtagctgtcaccaccaaaggccttagcgatttcagcatagtgagcattgtggcttaaaacagtaggtcctaattggtctttaactgggttacggtcaccattgtagataccaccattgttaatgatgacaacggtaacaggtaagtggtaacggcagatagtttccacttccattccatcaaaaccaaaggctgagtcaccatgaagtgagatgactttcttaccagtttcaacagctgcagcaatggcataacctaagccgacacccattacgccccaagtaccagtatcaagacggtgacgaggtttttgcatgccgattaagttacgaccgatgtccaaagtgttggcaccttcacttacgatgtaagtatctggatgcttttgcattaagtcattgattggttcaatcgcactgtaaaagcctaaagttggcttagcttctgaggcagcaattcttttggcaaatttttcattgttagcttcacaagcattcttaattgaatctagccagtcttgaggggccttaacgtcagctttttcaagggctgcgtttagtttttgcaaaacagaggtaatgtcaccttgtaatggggcatcgatctttctgtttgagtcaaattcagtagcgtcaatatcgacttgaacaaacttagcatcttcattaaacaatggagcctcaccatttgaaagcatccaattaagccgagcaccgattaataagactacatcggcttgacctaaagtaaatgaacgagctgaagcagctgatgatggtgagtcatctggtacaacgcctttagccattgacatcggcaaaaatggaataccagtcttagtaactaattctctgacttctgcttcacttctagcataagctgagcccttacctaggataatagcagggtgtttagcgttttttaataattcaacagcacgttcaattgcgtcatctaatggcaattgctttggagctggatcaactacttcatagatatgagcgtctgacttttgtgcaactgtgtcggcaactgttgcagcaggaaggtcaaggtaaccaccaccaggccgaccgctcatagcagttctaacggcacgagcaactgctaagcccatgtcttcagcacggtcaacacgataagctgctttacataaaggtttagcaacattgtattgatcaagtccttcatagtctccacggtcgaggtcgatgatatgacgatctgatgaacctgagatcataatcattgggaagcaattcttagtggcttctgctaaagcagttaaaccatttaagaaaccaggagcagaaactgttaaggctacaccaggcttgtcggtaagaaaaccagcagcagcggctgcgtctacagctgcatcttctcttctaaattcataaaacttcataccctttaattcagctaaacgggcaaagtcagtaactggaatgccgacaacaccatacatgttgtttaaaccgtttgcttgtaaagcatcgattaaaagtgcagcaccagtaagtgatacattttgtgtcacgaaaaaaattctttcaaaaaatcaccaaatgcttatgtttatgcatttcaaaaccaagatacacctcttgaattgtatatacaggcataattgaataataaggtacgttattttaatatacgtatataaaaataagcaagtcctaatatattagaacttgcttattatacttttattcaaaattgtccatttcttcgattgccttttcccaggcagaatttgcttcatctaatttctgttgtacatcagaaagctgttcttgcagtggccccaatttatcaaagcttgaagcaatttctggattggccatttcggtttggatttcttgctctcgttcttcaagctgttcaatttgtttttctgcattatcaattgcacgctgcaactttctcttttgagaatcacgttgcttttgctcttggtaagaaagtttttgctggctaatttgtttgcttggctcgacttctggctcagcggcactattttcagccatagctgcttgttttgccttctcatcaagataataagaataattgccatcgtagactttagcatgcccatcgcgaactaaaacaatcttattagctagttgattgataaagtaacggtcgtgggaaacaaagagcagggtaccatcaaagtcttttaaagctttttctagtacttcttttgcttcgatatctaagtggttagttggttcatccatcagtaagaagttatcatgctcaagtgataaaacagttaaagttaaccgtgctttttgtccaccagataattgacctaccgttttatcaatgtctttagctgtgaataaaaaactggctaagattgaccgtacatcgcgttcaggcatggttttgtgacgatcccaaacagtatccaatacagtcttagatgaatctagtccttgtaattcttggtcgtaataaccaatctcaagggatgcgccatacttaattgagccactcttgggcgttaattgcttcataatagtcttaagcagggtagatttaccgattccatttggtccaatgatcgcgacgcgatctcctttattaatctggaaggaaatatctttaaccatggttttatcgggataaccaatcgtcaaatcgttgaaaattaatacttccttgccagaaggatgatcgcttgaaaaatgaatccgtaccttatttttatgtttaggtggagtaatccgctcaattttttctagttttttacgccgactttgtgcacgcttagtggtagttgctcgaaccaagtttttttggataaattcttcatcttttttgatttcagcttgttgcttttcataagcggcttcttggtccttatcacgttgctcgcgctgcatgacataggctgaatagttgcccttaaaagcagttaatttaccaaattctagttcaaaaatttgggctgctaaatgatctaagaaatattggtcgtgggaaaccacgaggattgcaccactgtaattctttaaaaatccttccaaccaatctagggtatctaaatctaagtagttagttggctcgtccaataacaacagagcaggtttgcgcaaaagcaacttaacaaaagctaaccgtgttttttcaccaccggataaactaccaatcttcttttgccaagtgtcttcaggaaacttaaagccattcaagatacttttaatatcagattgataagtataaccgcctttttgttcaaagttgaattgcttttgatcgtattgcttaagcaattcttgatcttcaggatgatctgcaattttttcttgtagttggactaagctttttctttcccttattaaaggagcgaaaacggtttccatttcatcccaaatggttttattttcatctaatgcattttcctgagcgatataaccaacatcaatgcctttattaactgtaaattcgccgtgagttggttcttgctcacctgtcattatttttaacagggtagtcttaccaaccccgttaggaccaactaagccgattctggcattggaatcgattgaaaaattaacatttttgaataatgtgttggccccaaattgttgttctaaatcgtgtccttgtgcaataatcataatttttcacctaaccactattctaccatatagcgcaaattgtttgtttttaagttaaatatgtgaaaaaatgatgatttgtgaaaaagatacttgcataagtactatcatagcaggtatgatagtagtgcttgattgtacattcacaaacatttaagtttggagggttcctatatggaaaaaataaaaatcccaaaagcaacggcaaaaagattaccattatattaccgttatttgattattttaaatgaagaaggcaaagataaggtttcttcaactgagctgtcagaggcagttcaagtagatagtgcttcaattagaagagacttttcatattttggtgcgttgggaaaacgtggctatggatatgatgtaaagaatttattgagcttcttcaagaaaattttgaatcaagatactttaactaatgttgctttaataggtgtaggtaatctgggacgggcgctgcttaattacaactttaagcgcagtaataatattcgaatttcctgtgcttttgatatcaataaggagattactggtcgtatcttaagtggtgtccctgtttatgacatggacgacttaaagcaacaactaagtgatcaacagattacaattgcaattttgacagttccttcaacagctgctcagaaaaccacagatgaaatggttgatgcgggtgtaaagggaattatgaactttactccgattcgtttatcagctccagctgatgtgcgagtacaaaatgtagacttagcaaccgaattgcaaacgttgatctatttcttagatagtgacaaagaaaactaaatttgagtaaaagaaacatactaacctagtgttggatcatgaatcgacggattcacgatctggcactttttattttgtctaaaatagaaagtgaagataaagcaaatcaagtcttcagctttttagacacttgatgtcgtaaaagaaacggactgctttaccacctattcttaagtctcttcgaagtctgtgggcacttagatgccgtgtttagaaaattagaattaataggttgataaagaggtttatcttcacagcggaggttatattatggaatcacaaattattttcggtattgatgttagcagtaaatcttccacagtttgtgtggttaatgaccggatcaaacaaggcgaatcttttagaatctctaatgattcctttggctatcaaaaactttatgagcaactgaaccaatatttgataactcctttagttgttttcgaagctactggtgtttattctctaagcctgcaagctttcttagaggattatcatattaagtatttgaagcttaatccgcttaaagcgaaaaagctaatggacaataatttacgccataataaaactgataaggtagatgcttatcgcctggctttaattcaatttaatgccccgcaaaagctgcgtgatccacagcccagagagtatcatgaacttcagaatgccagtcgctattatgaagaacttactaggagtatagttactactaaaaatcaattgcaccgcaacctccaatccactttcccacaaattgaagaaatactgtctcatccatctggcagaatttattgggcgcttgttagtcttttcccacatgctggatatgttctagaaaagaatgagacacaggtaactcaaatgcttaattctatttctggaataggacaacaaagggcacggtacttaaccacaagattatacgcttttgctagagaagcttatccttatgattccaaagatagtattatcgttagagctattcaaaggaacatttctaatttattttcactccagcaagaacgcgactatgtaattaactacatggaaaagctggctaaagcagtaaacgctcgtgctttatccatctatttgagtatcccaggggttgctagaattacagcagtgagattagtagcagagctcggtgatctaagacggtttagcacttcagctcaaattgatgcgtttgttggcattgatccaggaaggtaccaatctggtgaaaaagacagttctcttggcattaccaagcatggcaatcatattgccagaaaaatactttatcgagttattactcaaatggagacggtaaaggctacgcagccttgccatataactgattattatgacaagaaaaaacgatcttcaaatagacaaggctataagaaaatcgccattgcatcagtccataaactgatacgcacaatgtttgctcttatcaaacatgatcaattatatgattacaacatagccaccgaaaataaaagactttagctgaaatcaaataatcaacttaagtataagcaacctatggaaaaactacaagtattcataggcttatttgtggtactttcgctttttcttaaatttaaactcttatttgctttaaccttattcgcatcattaaaacaagtaaatttattttcttaaatcattgataatacttgactttgggtagaaaaaagccgattttcggctttttttcatgcagttgtttcacttttgattaatttgacaggcaaaatataattcttttggcgcaatttttcgtcgggattggaaattcgggtaagcaataacttaaccaataaagttgcaatatcatgaattggctgagcaattgtggatagttccgaatggtaagtttgaatttgctttgttccgtcaaaaccaatcacttttaattccttaggcactttaatgcctaatttttttgcttcttgtaaaactaacactgcagttaaatcatctgtgcagacgacgccatcaggctgatcattgactaacatatcatgaattttcatatttttaatgttggaagaatcagaaaaagcaactgaacgaatgtgggctgaaaagtgacattcctttgcttcatcaagataagctgctagtcgttcgtcagtcggattaccttttctgtgttcattgcccagaaagtaaattttgtgacaaccagcttgaaccaagtcatgtactgccaacttgatgccttgataattatcacaactaacaattggaacattatcagatagctttcggtcgaaagagacaattggcaaacctagttgttggtattcattgatacctagattgtgcgcaccagcgatgatgccatcaacttgattagcctgaagcatgcgcagatattcgcgttctttttctttgttttgtcctgcattgcataggattactttatagttttgttggaataaagtggtttcgatatcctgtactaattccgcaaaaaaaggattagtgatctcaggaaaaatcaaaccgactaatttcattttctttccttgtaatgagcgggcaatagaattgggacgataatttaattcccgcattgcggcaaaaactttatctttagttttttgacttaaatagccatggttgttgattactcgcgaaacggtagttacagagcaaccggcttttttggcaacgtcgcttaattttgctgccatagtatcacctgatgtttaaagaattgtttgcatttgccaaagcttgccagtgtagtcaatgtcttgagcaaacgcaatttttttgttggtctgatcggcaaagtagcgtccagtcaataccttttcaccatcattaacgaatacttcaattaatgaatgatcaacaaagatatcaagcttgaggtcatgatttggtgaaagcgtaatagctcgactttcgccataatcaactgctactttttgcccagcatgagcacgatctaatactaatttaccatttttggtatcgaaattgagctgtaaactgttacttaagtcattatttgcagctaaatgtaaagtgccactttggttagccttaattgttaattcaagttcaaattgttggccggcttgatcgctgactacttgattagatatgcttgcttcgtttttgcggatactgcttattgccttaactggcgtttgaattaacttgtcactctttaggtggagttccttcacttgactcaagcagttagcccagttttcatcatcagtagggtaagtagtgtcaggcaagccaacccaactgacttcgtaggcattaccatctggggcgttaaaggcctgagtggcataaacatcgaacccgtgatccaaattgtgtaatttacctggattaattaacttatgattttcccagtcaatatcatcagcaataacgtacatatttgggtaaatgtcatcataagctgctacttttttgtctaaaccctgaggacagaaaatgaccacgactttgccatcaacacggacgatgttgggacactcgatcatgtagcccatgtcttcgttggtaaagtctaagaagcccaattcttcccagttctttagatcctgagacttccaaacgtcaatgtgaccgtgtttttcctttttatcttgggcacctaaaattgcgtagtaagtgtcattttctttgataatttggggatcgcgaaaatgttcggtgatgtgatctggattcttaaataggatggttttgtctgaaactttattatttttatccatccaagcaccgatttgataaggagtacgtacccaattttcatcgcggtggttaccggtatacatgatgaaaagcttaccatcgatttcgcgagcagagccagaataagctccatgtgaatcagccattgtgtctggttcaatacctaagcctaagttttcccagtgaaccatgtcagttgatttgaagtgccaccatgactttagaccgtgaactgcgccgaatggatatgattgatagaagaggtggtaagcaccatcaaagtaggaaaatccattagggtcattaattaagccagaaataggatgcaaatgatagcgcatttggtaaggggagtttgcggcttgtgcttgcaaatgcattaatgtatcagcgtcccaatcttgataaggtaagtaacgtttttctcttgtccattccataaatatacctccatgaaagcgttgtctttttacatgtattttaagttagtatgaaaaatatgtcaaacgtttaacagaaaaaataattattaattcataagtaataaaataaataaagaattttatgtcaaacgattgacatatttttttgaatgcgttatcataattagtgaattgagaataaaacgtttacataggagggatcaatatggaccacagaaaagtggctgaacgagtaattaaagacgtcggccgtgacaatattattgccggtgcccactgtgctactcgtctgcgtttagtattaaaagatgattcaaaagtcgaccaaaaagcattggataatgatccagatgttaagggtacttttaaaaccaatggtcaatatcaagtaattattgggccaggagatgttaatgacgtttacgatgagttcattaaaatcactggtttgaaagaattatcaaccgatgatttgaagaaggttgctgcagaaggtaaaaagaagaatccagtaatggatttcattaaacttttgtctgacatctttgttccaatcattccagccttagttgctggtggtttgttgatggctttgaacaacttcttgacttcaccaggtctgtttggaccaaagtcagttgttcagatggtaccgaatgttgctggtatttcaagtatgattcaagttatgtcagcagctccgtttatttttatgccaattctagtcggaatgtcggcagctaaacggttcggtgctaaccaattcttgggtgctacaatcggaatgattatgacgacacctggactccttggtgcaaatcacttctgggacatttttggcttgcatgttgcgcaaactaactatcaataccaggttattccagttttagtagctgtttgggtattgtcaattttggaaaagtacttccacaagcacttgccatcagctgttgactttacctttacgccacttctttcaattatgattactggctttttgacttttacaattattgggccagtcttcaaaggcgtatcagatggtattaccaatgctatcgtttggctatatgacactactggtgcctttgggatgggtgtctttggtcttacctattcagctattgttactactgggcttcatcaaagttttccagcggttgaaactcagcttttagcagcctttgctaagaatccagccagctctggtgactttatctttgttaccgcatgtatggctaacgtagctcaaggtgccgcaactttcgctgtttacttcttaactaagaacaagaagatgaagggcttggctagttcatcaggtgtttcagcacttcttggtattactgaaccagcacttttcggtgttaacttgaagtataaattcccattcttctgtgccttaattggttcaggtgtagctgctgcttttgcgggcttgatgcatgttactgcagccgctcttggttcagctggtttcttaggcttcctttcaatttatcctaagactattccaatgtgggttgtttccgtattaattagttttgctgttgccttcatccttacttatgtttatggtaagggtcatttgaaggaagaagttgctgaacaagatgttccagtaaacgacgcaactgattatgctgaagaaactcaaaaggctgaaaagcttggtaaggaacaaatggcattaaaggatgaagttattgcttcaccagttgatggtactcctgagagtttaactaaagttaatgatcaagtattctctgctaagttaatgggtgatggtgcagccgttattccaagtgatggtacgatctattcaccagttactggtactgtgactattgcttatgaaactaagcatgcttatggcattaagtcagacgatggtgcagaagtattgattcacattggtcttgatactgtaaaccttaagggcgagcacttcgaaagtttcgttaagcaaggtcaaagagttaacaagggcgataagcttggtacagttgaccttgatgctgtgaaaaaggcaggctatgatactactgtcatggtagtaattactaacactgccaactatgcaaatgtttcaagaattactgatgcgggtgacaagcacggcgacaagttgattgctgttactgcacacaattagtttcttctactcctctagaaaaaattaaaacaattagaataaaagacgctaagaaagattgtttcttggcgttttttagtactaagtgctgcacttcaattttaagtttgagtaaaatgttctctataaagaaaaacaaagtgagggtatgttttatgaagttaaaaagtggagttattggagtattagtaactggattaactgtctttagcattaatctaactagctctaaaataaaggcagcgataacagtgcctaatcctaagacagattatgtagttaaaactacttctaatgtgtataagagtaatggtaagaggaccagttttaagacacgtggtcagatacaaaccggtaatgttccagtaattgaatcacaactatatgaaggcaagttcattaatgtgcaaggaactaagacgattaatggtactgcttattataagatcggtcctaacgcatacattaaacaaaataatgttttaaattatgctcaagaaaaagcaaagcttgaggcatatcaggcacaagatgatgtgaatgatgattcagatcagtcaacagaattaagctctgattatgtgaattttgacatagcttggtatgacaacattaatgaggatccatctccagcgatgttcgatgattcaggatatcataatagagtgattaagaatgctcgtaaattattaggctatttcacttatggaacaggtgcataccgaactaattttggcagttggcgtcatcctaataaaaacggttcaactgattgttcaggatttgtgtggatcgtaatgaagagagcaggatatcgtgtaggaaatgctccattttttactctgccaatggaacgagatgctaaaagtactcatggctatttgaagaaaatttctgccaagaatattcgcccaggtgatattgtgattgttaatactggcaatggtgttggtcaaaacggacatgcagcaattgttgatggcaaatatgatggttgggacacgcaaattattgaagagggcggcaacttaggtgtagatgatgtgcaccgctctagtttaggtagctcactgagcgataagctggccaaaggtcgaatcacttatgctcgccccgttaaatagtatgctctatgctataattttgctaatcaataaaggataataagaatgaaaaagaacagcacgcttaaacatgtctggattatgacggctgtctattgggtagtaggtattctaagtattttctggggtaagcttgatcatacttttgcgtctcaattaaaagagatcaataatatttacgtgttagttttaataattatcttaagcttgccgctacttttatcgctgttattgtcggttaaagtaaaaatgccacgtttgatctgcaatccactagttgctgtaatttatctattagtggtaattgcagcaggtgtagcatataacttacaaaatattattggctacttcttcccaatcatcctcttcattattatggcgctagttgctgttttctatgctttggttaagacttttagcagcagaaaaagtggtaaatatttttttattgatggtaaagataagaaagaatgccatgatttctgggatgcttataagaagtactatgtaatgggattaacttacggcattattgatggtttgattactgtaattagttaaaaaagttaagaaaaatcaaaattagcactcaattgaaaaaagtgctaattttttcttgctttttttcacaaaacagtttattatcatatttgtaagttagcacttagcaaataagagtgctaatgattaatacagtaataaaaaatataatgaagaaaattaaacataagggggactaaacgtgttacaaccaattggtgatcgcgtgatcgttaaagttaagaaagaagaagaagaaactgttggtggcatcgttttagcatcaaatgctaagaagaagccaactgaaggcgaagttgtagctgttggtgaaggtgcttacgcatcaaacggtgaaaagattccaatggctgttaagaagggtgacgtagttctttacgataaatactcaggcactgacgttgaatacgaaggtgaaaagtacttagtccttcacgaaaaagacattttagctattgctaagtaatttagttaaaatttccaacgataattaagtaaattaaggagcatagataatctatggcaaaagatattaaattctcagaaaatgcaagacgttctcttttaaagggtgttaataagttagctgatactgttaagactactattggtcctaagggtagaaacgttgttttggaacaaagttacggcaaccctgacatcactaacgatggtgttaccattgcaaagtccatcgagttaaaggatcactacgaaaacatgggtgctaaacttgttgctgaagctgctcaaaagactaatgatattgctggtgacggtactactaccgcaactgttttgactcaagcaattactaatgaaggtatgaagaacgtaactgctggtgctaacccagttggcattcgtcgtggtattgaaaaagctactgaagctgctgttaatgaattgcacaagattagccacaaggttgaatcaagagaccaaattgctaacgtagctgcagtttcatcatcttcaaaggaagttggtaacttaatcgctgacgctatggaaaaggttggtcacgatggcgttatcactattgaagattcacgtggtatcaacactgaactttcagtagttgaaggtatgcaatttgatcgtggttacttatcacaatacatggtaactgacaacgataagatggaagcagatcttgataatccttacattttgatcactgacaagaagatctcaaacattcaagatatcttgccacttcttcaagaaattgttcaacaaggtaagtcattattgatcattgctgatgacgttactggtgaagctcttccaacacttgtattgaacaagattcgtggtaccttcaacgttgtagctgttaaggctcctggctttggtgaccgtcgtaaggctcagttacaagatattgctgctttgactggtggtactgtgattactgatgacttaggtcttgaattaaaggacactaagattgatcaattaggtcaagctcgtcgtgtaactgtaaccaaggactcaactactattgttgacggtgctggttcaaaggatgctattcaagaacgtgaagattcaatcagaaagcaaattgaagaatcaacttcagactttgacaagaagaagcttcaagaacgtcttgctaagttaactggtggtgtagctgttatccacgtaggtgctgctactgaaaccgaattgaaggaacgtcgttacagaattgaagacgctttgaactcaactcgtgccgctgttgatgaaggttacgttgctggtggtggtactgctttagtagacgttgagaaggctatcaatgatcttaaggctgatactgcagatgaaaatactggtatccaaatcgtattaagagctttgtcagcaccagttcgtcaaattgctgaaaacgcaggtaagaatggtgaagttgttttgaaccacttactcaagcaagaaaacgaaattggctacaatgctgctactgatacttgggaaaacatggtagatgctggtatcattgacccaaccaaggtaaccagaaccgctttgcaaaatgctgcttcaattgccgctcttctgcttactactgaagctgttgttgcagaaattcctgaagaaaagccagctaacccagctccacaagctggtgcaccaggaatgggtatgtaattatatatcttaatgctttagcatttagatatataattcttgattacgaagtaatcaagttcatttacagtgctttagcactaaacttatgcacaaactctcactctagttcaaaaacaaatataattaaaatgacttcgaagttaaacaatcagttcagcttcgaagtttttctttttgtagcgtataatattgtacgtaactctatctaaaatacgaaataggaaagagacataaatgacggaaaaaacaactccaatgatggagcaatattacgaaattaaaaaacaatatcctgatgcctttcttttttatcgcgtcggagacttttacgaactgtttgaagatgacgcagttaaaggtgcacagattcttgaattgactttaacgcaccgatcaaatagaactaagaatccaattccaatggcaggtgtgcctcatatggctgtggatacttatgtaaatactttagttgaaaagggttataaagtagcactttgtgaacaacttgaggatcctaaaaaggccaaaggcatggttaaacggggaattattcaattagtgacgccgggaaccatgatgaatgaaggcccaaatgatgctaaagattcaaattacttaacatcagtaattaccactaagagtggctttggtttagcctacagtgatttatccactggtgaaatttatgctactcatttaaagagtttcgatgctgtttccaatgagctcttgtcacttcgtactcgtgaagttgtgtataacgggtcattatctgaacaaaataaagactttatgcacaaggccaacattacgatttctcgacctactccaattgaaggtgaacatgctgaaatttcttatgttgaacagaatttgactaatggggctgaaaaagaggctacccgtcagttagttggctatttgctttcaactcaaaggagaagtttagcgcacttgcagattgccaaaagctatgaagtaaatcaatatttgcagatgtcacatactgtgcagaataatttggaattggttgcttctgccaaaactggcaaaaaaatgggttcacttttctgggttttggataaaacacacactgccatgggtggacgcttgcttaagcagtggctagctcgtccattattaaacatggatgaaattaaccatcgtgaagaaatggtgcaggccttgcttgatggctactttacacgagaaaatgcagttgatgccttaaagggtgtttacgacttggaacgtttaactggtcgaattgcttttggtaacgttaatgcgcgcgaattactacaattatcacgttctttgcaggccgttccagttattttagatgctttagagcaatcagattcagatatcttggtcgattttgctaaaaaaattgatccattaaagggcgttgccgaaatgattacttccactatcgtgaaggatccacctgtgttgactactgaaggtggcctgattcaaggtggggttgatccgcagcttgatcgctatcgggatgccatgaacaatggaaaaaaatggttggctgaaatggaagcagatgagcggcaaaagacaggtattgataacttaaaggtcggttataacaaggtctttggctattatattcaggtttctaacggtaacaagtctaaggtgccacttgatcgttatacgcgtaaacaaactttgactaacgctgagcgttatatcacaccggaactcaaggaacatgagaatctaattcttgaggcacagacacggtcaactgacttggaatatgatttatttgttaagctgcgtgaggacgttaagaagtatatccctgctttacaaaaattaggtgggcaactagcagcgctggatgtttattgtggttttgctacagtagctgaacaaaataattattgccggccaacttttcacgcagataatcaagatattaatgtgactaacggccgtcatccagttgtggaaaaagtaatgacggctggttcatatattcctaacgatgtcaaaatggatgaaggaaccaacatttatttaattacaggtcctaacatgtctggtaagagtacctatatgagacaaatggctttgattgcgatcatggctcaagtaggttcctttgtgccagctgatagtgctgatttgccaatttttgatcaaatttttacaagaatcggagcagctgatgacttaatttcaggtcaaagtacctttatggtagagatgagtgaagctaatgaagccttgcagtatgctactaagcgcagtttggttctctttgacgaaattggtcgtggtacggctacttacgatggaatggctttagctggtgcaattgttaagtacttacacgacaaagttggtgctaaggcattatttgctacgcactatcatgaattgacagtgatggatgagactctggatcatctgaaaaatattcacgttggtgctaccgaagaaaatggcaagttaatcttcttgcataaaatcctacctggacctgctgatcaaagttacggaattcatgtagctcaattagcaggtttgccgcgcaacgttttgcgagaggcaactaaattattaaagcggcttgaagcacaaggcagtgaactagcaccagtttcgcagcaattagatttatttgcagagcctgtggaaaacagtgttgaagaaactgaaacacaaaatgacaagcccgcaataactgatgcacaacaagatatacttgatgatatttctaatctttatttagcagataagacaccgttgcaggttatgcaaatggtagctgattggcaaaaagatttaaaggatgacgattaatgagcaaaattcatgagttatcggaaactttaactaatcagattgcagccggagaagtaattgagcgcccagctagcgtagttaaagaattagtagaaaactcgttagatgctggtgctactcgaattcgcgttgattttgtagatgctggtttgaaacagattgtagttcaagacaatgggacggggattgcacgtgatcaagttgatctagcctttacccgacatgcgacaagcaagattgccaatgaacacgatttatttaaagtttccactttaggcttccgcggagaagcattagcttcgatttctgctgttagccatgtggaaattctgactgcaactgaaaacgcaattggtattcgagctaactatagtggaggcaataaaaaaggccaagaagatgcagcggctcgtaagggaacaaaaattacagtcaaggatttgttctttaacacgccagccagattaaagtatttgcgtagttcaagaactgaaattatgaagattgtggatattattaatcgacttgcgttaggttatccacatgtgtcttttactttgtcaaatactggcaaaattttattaagaacgccaggaaataataatttaaagcaaacagttgctaacgtgtatggccgtcatatcgcagaaaaaatggaaaaatttgaggcaaaagacagcgattttaagattacaggtctgatgtctaaaccggaattaacacgttctacacgcaattttatttcgattctcttaaacggccgctatattaaaaattttcaattaaatactgcgattctggatggctatggctcaaaattagcagcgcggcattatccgattattgtgttagcaattaaagtagatcctttgttagtggatgttaacgtgcatcccactaaacaggaagttcgtttatccaaggaaaaagaactgggtcgtttaatcaccagtgcaattagtaatacacttgtggaaaaagttggacaaattagcgcttttgctaatttggaaaataaacgtgatacgctagttgatcagcttagttttaacttaaatcaagatgttgtaaatacagctcgtaaaaaagaaccggaaattcgcgaacaagaaaagccaaaatttttaacgattgaatctgatgattcagaagataatattcaaaatgaggcggtaaagcaggatagtgaaaagaaatatgttgatcttaatcagccacgtgaagatgatcaatatatcgttactaagacctggaaacaaaatgttgctctgcagcaagcactaacgccatttcctacaactaggactaatcaggaagtcatttcaagtggggatgaaactttagctaataatctgcctcgcttggtttatgttggacagaccgatacttatttatttgcccaacataatggcgacctatttttaattgatcaggttgctgctagacgaaggttaaaatttgagcaaatttttcacatgataactgccaaaaaagtagtacaacaaggtttgttaacaccaattattttagaatttggtaatcttgattttatgcaaattaaggatcaagtagaacagattaagcaggttggaatctatttggaagattttggacaaaatagttttattgttcgttcgtatccaacttggattcacgataatgtcgaagattcaattcggaagattttagatggttatttgaatgtggataaaggaaaggcaaagaacctgtttagccggatagcagcaatgcaagctaagcgagaaattactggcaagattaaattatctgcagctgaagctgagcaaattttacttgatttacgcaagtgtactgatccatatcatgatgcagatggacggataattttggttagaatgagccaaaatgaattgagaaaaatgtttaagaaggatgaataatgtacgaatattttgaaggtgtgattactgtggttacaccaagctatgttgtagttgatgtcgggggcgttggctacaaggtctatagtcctacaccttttgcctatactcaaggccaaaaagctaaggtctttattgagcaagtggtgcgtgatactggcattactttatatggttttcaaagtcaagatgataagggcttgttcttaaaactacttagtgttagcgggattggtcctaagagtgcaatggcaatcatggcagctgaggatagtaattctttggcggaagcgattgaacaaggtgaagttaagtacctaactcgttttccaggtgtgggtaaaaagacggcttcacaaattgtgcttgatttgaagggtaaattaggtgattatgttgctcggcttgatcgtccagacaatggtgagaatgtgccgccagcattaaatgatgcactgcttgctttaattgctttgggttatacccaaaaagaagtggatcggatcacgcctaaactggagaaagttgctgcaaatactgcagatcaatatattaaaaagggcttagcattactgcttaaaaagtagatcttggtataatagaatagatgattattttttaaggaagtgaaactggtggcagaagatcaagtaacttcaggtgatattgagaatcctgaagaacaacaaatggaactttctttgcggccgcaaacgctcgaccagtacttaggtcaaaagcgggtcaaaaaagaaatgagcatttatattaaggcggcgcgccaacgtgatgaagcattagatcacgttttgctttatggaccaccggggttaggaaagacaactttggctttcgtaattgccaatgaattgggagttcatttaaagagtacaagtggtccggccattgaaaaggcaggcgacttggtggcacttttgtccgacttagatcctggggatgttttgttcattgatgaaattcaccgtttagctaaaccagtagaagaagtactctactctgcaatggaagactactatatcgatattgtgattggcgaggggcagactactaatgcagttcacgtgccgctgccaccatttactctaattggggcaacgactttggctgggcaattgtcagcacctttgcgtgatcgctttggcatcgtagagcacatgcagtattacactatcgatgagctagaacaaattgttttgcgttcaagtgatgtttttcacacttcaattgcgcctgaggcggcccatgaattggcacgacgctcgcgtggtacacctcgtgttgccaatcgcttacttaagcgggtgcgtgattttgcggaagttaagggagaaaaaacaatttcgctcgagactactgaaggcgcgttaaaacaattgcaggttgacgatgagggacttgatcagacagaccgcagattattgagaacgatgatcgaaggatataatggtggtcctgttggtattcggactttggcagctaatgttggtgaagatatggaaacgattgagtcactatatgagccatatttgttgcagcatggttttattttactcacgccgcgtggcagaatggtgacggataaagcatatttacagttaggattaccaattccaggtgataaatagtcccattttctgtataatggttataatatctagaaaataattttaatgaggtggaaattttgaacattttatttttagcaaatgccggtgctgcagcaagtagcaactggatgatgatcggtttatttattattttgatcgctttcacttactttggtatgattcgtcctcaaaagaagcaacaacaacaaagaatgcaaatgatggacaaattgaagaagggtgacgaagtcatcttagttgatggtttgcatggtaaggttgacaagatcaacagtgataagactatcgtggttgatgcagatggcatttacttaacttttgaaagaatggctgtccgtcgtgtgattccagttgctgcaccagcaactcctgcagctgaaactaaggctgaagctccagcagaaaagccgaaagaaaaagcagacgaaactaaaaaagaggataagtaatcatattacttaagagcgtcattttaggcgctttttgttttgctaaaaaaatccttgttgtaaaatagaagtgataattttagttcaaagaaagggatctgaaatgaagaatattcccgttgtaatgattctttttggtggtagtggtgatttggctcaccgcaagctttatccagctttgtttaatttgtatgaacaaggcttaattcacgacaactttgcagtaattggaactgctcgtcgtccttggtcacatgagtatttgcgtgagcaggttagtgatgctattcatgaaacgcacgatactgttgatgaaaatgagttgaaagcttttgcaagtcatttttattatcaatcacatgatgtaactaatgtggaacactatgagattttgaaaaacttggcacaagagctcgatgatcgttatagtgcacaaggcaatcgtctcttctacatggctatggcaccaagattctttggcacaatagcaacgcatattaatgaccaagacttgactggtagtggctttaatcgaattgtagttgaaaagccatttggtcatgatttggcttcagcagaggaattaaataagcaaatcacggcttcatttgatgaaaatgatatttttagaattgaccactatttaggtaaagaaatggttcaaaatatcatgccaatgcgttttactaacccaatggttcaaaatatttggtgcagcaagtatattaagaatatccaagttaccttggcagaacgtcttggcgtggaagcacgtggaggttactatgatacttcaggtgctttgcgtgatatggtacaaaaccatatttttcaaattattactctgctagcaatgccagaacctaaggatctttcttctgctagtgttcaccaagccaagcaagatttgcttaagagtttaattattcctacgccagatgatgtcaagaaatactttgttcgtggtcaatatttgggtagtgatactacttttgcttataagcaagagccaaatgttgatccagagtcaactactgaaaccttcgttgcaggtaaagttaagtttaatgagggaccaattgctggcgtaccaatttactttagaacgggtaaggaatttaaagaaaagaagaaccggattgacattgttttaaagcatattaataatccatatgggcaagctcattctaacaatattacgatcgtgattgacccaactagtgaaatttactttactattaatggcaaacgaattgaccaaccaggaattcgccgtgaaaacttaacttatgaattttcaaaagccgaaatggctaaggtacctgatggttatgaaagattgcttcatgatgtttttgtcaatgattcaactaactttacgcactggagcgaattgaagcgttattgggaatttatcgatgcagttgaagatgcttggcagaaggaaaatgaagcaggcaatccagccattgcacaatatttgccatacagaatggggccaaaggaagctaatacaatctttgagtcaccaactgaacattggatttatgaataaagaaaatttattaccgcaaaatgacatccatcgtcggattattcatctggacatggatgctttttatgcttcggttgaaatgcaggagcatcccgaatggaaaaataaggcattgattgttgggcaagatccacgacaaaatggtggacatggagtagtggctacttgcaattatgtagctcgtaagtatggcgttcattcagctatggccgcaattcaagcagtacgtttggttcccaaggagctaatagtttttactagaccacgatttgataaatatcgtgcagtgtcagctaaaatccattcttttatgcatgatgtgacagatcaggttgaatcagtggctttagatgaagcttatctagacgtgacacatccaaagatagagcaggagtctgcagttcaaattgctttagatttacagaaaaggattcggcaagaagtaggcttaaactcgtcttttggcgtttcctataataagtttttagctaaaatgggatcagaatacgccaaaccgtttggtcgaaccgtaattttgcctagtgaagtgcagaactttttagcaatgcaaaagattgagaagtttcctggtattggaccgaagacgcaagaagagctgcatcagataggtgtttatactggggcagatttagaaaaagttgaggttttaaccttaattaaaaaatttaagaaaatggggtatattttagcccaacatgcacgtggaatagatttaagacctgttgttacagactcagaggctaatcgaaaatcaattggcatggagcggacttacgagcctgcaatttatactgaggatgaagccctaaccaatattcgtaactattgcaatcatttggaagcagcattaaaaaaacgcaattttaaggcaggtactgttgttattaaagtaagaaataataattttgatacggtaaccaagagaaaaaagttgaaaacaccttctgatagtcacttagatttttatgatgtggctcgtgacttgttcgaagcaacaagttcctttttagatgatggaattcgtttattgggagtcactgtaactgactttgaaaagaaaaaatatcaatcaatcagtttgttcgactaataaataaagctatttttctggtaaactagatacagatatttttacaagatgaggagattaaaaatgagtagttttgatgacatttatgaaaaaatcttacaatatcctacaattatcttgcaccgccacactagtcctgatccagacgcaattggttcacaagctggtttagctagagcattaatggaaaaattcccggacaagcgcattctttgtgctggggaaaacgatgaaggcgacttagcttggattaaccacatggatcaagtcaaggcaactgattacgaaggtgctttggtaattactactgataccgctaatacaccaagaatttctaataagttgtatgataagggtgactttttaattaagattgaccaccacccagatgttgatccatatgctgatatgagttacgtagatccagatgctccagcagcatgccaaatcattgtagacttcttgaatgaagagggctttaagattaccaaggaagttgcttacccactttatgctggaattgtaggcgataccggtcgtttcatgtatccagaaacttcagagcatacttttaaggtggctgctcaattagcttctactggaattaacattactgaaatcgctcgtaatattgctgatgtaacttttgatgaggcaaaattgcaagccttggcaatggacaagatggaaattgatcccgttggtgcagcttttacaattttgatgcagtcagacttgaagaagttaggtttgactgatgatcaagcaaatgttgctgtatctactccaggacgtattaaagatgtgcttgcttggaatgtttttgttgaaaaaccagatggtactttccgcgtacattaccgttcaaagggccctgtaatcaatgaattagctgctaagcatgatggtggtggtcatgcattagctagtggtgctaacgctaaggatatggacgaagtaaagcaggtatttgcggaagtcgttgaagtaactaagaagtttaaagaagatcatgaataatatttttatagattcaagaattaaaccagctattcaggctggtttaaagaagatccattttgaaaagccaactaaggtgcaggagaaagttattcctgctatgttgtctgacttgagtgtagtagtgcaagcagcaactggttcaggaaaaacgcatgcttatttagtaccaatttttaatgaaattgaagaagataaacgctatgttcaagcaatcgttactttgcctagtcgtgaattagccgatcagctttatcaagtagcacggcagctccgtgatgcggcagggatgcatttttcaattgcacatcttgcgggcggaactgatcgtgaacgtcaattagaaaagtatcaaaataatactccacaattggtgattgcaactccaggacgtttgttagactttgttcaaaagaaggtttttgcagttgatcaagtaaaaacttttgttatcgacgaagctgacatgaccttggacatgggctttttgaacgacattgatcaagttgctgctaaattgccgaaggatgtccaaattgctgccttttcagcaactattccagttaaattgtctaactttttacgcaaatatatggctcatcctgatgagatcgttattgataatcctagtgttattgcgccaacgattaaaaacgatttgcttgatattggctcaaaggatcgcaagaatgtcttgtacaaattgttaactatgggacaaccatatttggcgttggtttttgctaacactaagcaaaaggtcgatgagttgactaattatttgcaagatcagggtttgaaggtagctaaaattcacggtggggtaactgaacgtgaaagaaagcgcactctgcgtcaggttgagcaaggacagtatcaatatgtggtagctagtgacctagctgctcgtggcttagatattgatggtgttagtctggttgtcaattatgaaataccacgtgatattgagttcgtgattcaccggattggccggacggggcgtaatggcttatctggtcatgcgataactttaattcgtgaagaagaaatgaaccgaattgaagaattggaaaagatgggtgttcattttgacttcgttgaaattaaaaatggtgaattagtgccacgtaaacactatcgcagtcgtgaaaatcgtcaaagcaagaatcgtaagcttgataccaagctggtgggttacgttaaaaaagagaagagaaagcgtaagccaggttacaagaagaagattaagcgtgcgattcaagaggataatcgtcaaaaacgtaagttggaacagcgtcatgaggttcgtaaggcaaaacgtttgagaaagcgcaagcgtgaacaagggctttgacagaagcggattttgtagtacaattatttcagcttaagatatgttttttgatcaattatttcaaagagagagccagttagatgagaatggcttaataatagtcaaaaaatgctcctttaagtttcataattaagaatatcaagaggtaacaaacactgttgcaatcaaggtggtaccgcgcgtggagcgtccttgaagaaagcaatagtgttttttatttatttttagggagatttattttaatgaagaaactaaatagttcagagtttcgccaaatgtttttagacttcttcaaggatcatggtcacatgattatgccaagtgcatcattaatcccacaagatgacccaactcttctttggattaactcaggtgttgctaccatgaagaagtactttgatggctcagttgtaccaaagaatcacagaattacttcatctcaaaagtcaatcagaaccaacgatattgaaaatgttggtaagactgcacgtcaccaaactttctttgaaatgcttggtaacttctcagttggtgactactttagagatgaagctattccttgggcatgggaattcttaactagtcctgattggcttggcttgccaaaggaaaagctttactgtactgtttatccaaaagatgaagactcatttaatgtttgggtaaaggcagggatgccagctgatcatattgttaagttggaagataacttctgggatattggtgaaggtccatgtggtcctgatactgaaatcttctacgaccgtggtcaagaaaacaacgacgttgctgaagacgatccagaaaacttccctggtggtgaaaatgcacgttaccttgaaatttggaacatcgtattttcacaatacaaccacttgccaaatggtaagtatgttgatcaaccacacaagaacatcgatactggtatgggtcttgaacgtgtactttcaattttgcaagatgcaccaactaacttcgaaactgacttgttcttgccaatcattcatactactgaagaaatgactccaggtaagaagtacggtgaaaacaaagaagacactactgcatttaagattattgccgatcacgttcgtgccataagctttgctattgctgacggtgctcttccatcaaactcaggtcgtggttacgttttacgtcgtttgatccgtcgtgctgacttgaacggtcaacgtttgggcatcaagggtgctttcctttacaagcttgttccagttgtaggtaagattatggaaagtcactacccagaagtaatggaccaacgtggctttatcgaaaacgtaatccaaaacgaagaagaaagattccaatcaactcttgatactggtttgactttgcttgatgacttgattgacaaggctaagaagtcaaaggacaagactatctcaggtaaagatgccttcaagatgttcgatacttacggcttcccatatgaattgacttttgaatcagcacaagatgctggccttaaggttgacaggaagggctttgacgcagaaatggctgctcaaaaagagcgtgcacgtaaagctcgtggtgaccttcaatcaatgggacgtcaagatgtaactttaatgaacattaaggataagtcagtctttgaacgtgatacttacgaagaaccacatgcaaagctagttgacattgttgttgatgataagttggttgataaggccgatggcgaacatgctactttagtctttgacaagactccattttacgcagaacgtggtggtcaagttgctgatcatggtaagatttataaccaaaatggcgaattagtagctgaagttactgacgtccaacacgcacctaacgaccaaaacttacactttgttgaccttattttgccagttgaaaagggtcaagaatacgtattgaagttagataaggaacgtcgtgaagggttacgtcactctcactcagcaactcaccttcttcacgctgctcttcgtcaagtcttaggtgaacacactcaccaagctggttcattagttgatcctgactacttaagatttgactttactgcaatggaaccaatgaccaagcgtgagcttaagaccgttgaagaattggttaaccaaaagatttgggaagctattcaagttaagactactatcactacccctgaagagggtgaaaagatgggtgctttagccctctttgatagcaagtatggtgataaggttcgtgttgttcaaatgggtgacttctcaagtgaattctgtggtggtactcacgtggacaatactaaccaaattggaatcttcaagattacttcagaatcagctgtcggtgctggtatgcgtagaattgaagctgtaacttctaagaaggcttatgaatacttggcaaaccgttcagacttacttgatgatattcaagaagaagttaaggcaaccaagccagataacattgtcgataagattgattcacttgaaagtgatttgcacgatgctcaaaagcaagttgaaactttgaacaagaagatcaatgctgctaaggctggtcaaatctttaatgacgttaaacaagctggtgacttgactgtcattgctgctactgcagatgttaacgggatgaatgacttgcgtgaacttgctgataactggaagagcggcaacaagtctgatgttttagttttagctgctgaaaatgctggcaaggctaatatgattattgccttaggccaaaaggcattagacaagggccttaaagcaggtaacttaatcaagatcgctgccccaatctttggaggtggcggtggcggccgtccaaacatggctcaagccggtggtaagaatccagcaggcttgaatgatgctattaaggcagttattgacgaaatttctaagaactaagaattaattaattgtgtttaagctttttttcaagtaaaattgttgacaggaggaataaatatgagttcgctagataagactatgcattttgactttaatcagaacaaaggaaaaaatgtttatgatactctgcaagatgtttacaatgcgcttgaagaaaagggctataatcctattaaccagattgtaggttacttactttctggcgatcctgcttatattccacggcataacgatgcccgtaatttgattcttaagcacgaacgtgacgagattattgaagaacttgttaagagttatcttggtaagaataaataatgcgtttattaggtttagatgtaggttctaaaactgtgggagtagcaattagcgatgagctaggaattactgcccagaagttggagactatccagattgatgaaagcagatataactttggtatgcgtccattgaagaagctagtcagacaatatgaagttgacggtttcgtattaggtttacctaagaatatggatggtacttctggtagttccgtagctagaagtaaggcatacggcaaacgactagaggaaaagtttggtttacctgtacattattctgatgagagattgacaacaattgaatcacgacgagtacttgttgaggatgcagggatccatgatcgcaagaagcgtaaacaagtaattgatcagatggcagcggtgctcatcttgcaaaattatttagatttacaccgaaaggattaaaatggcagcccaagttaatggtgacgatcaagatcgtcaaattactttgattgatgatcaaggtaatgaagaattgtatgagatattatttacttttcattcagatgattatgacaaatcttacgtgcttctttatccagccgctgttggcgatgatgaagatattgaggtgcaagctttcagttatgatgccgatgatgccggcgatgtaacaagtagcgatttgcatgagattgaatctgatgatgagtgggacatggtccagggagttttaaatactttcttagatgatgaccgcttgagtggtaaataataaaaagaggactggctgtggctggtcctttttgttagttttagaaaaaagataaaaatgaacaagaaaatattagagattttagaatttggcgaaattactaagcgcttgagtaaattagcgattactggtcccgctaaaaaagaagcggaggaattattacctagtggtgattttgaacaagtacaaaatgagttaaagcagactttagctttgactaatttgctacgaattaagggacaacttcctttaacggactttcaggacgtacgtccaagtactaaacgtttaagcatgaaagctaatctaaatgctaaggagttaggcaacttattattggtattaagtttagctcatgaaattaatgatttcttggcagaaatagatccaaataaattggatttgaccgcaatcgatgcaattttagatcaattagatgtgccagatctcttatttagagaattaaagaaatcagttgattatgatggcgaagtattagatacagcttcacatgagcttgctcgtttgcgtcatgatatacgttctaatgaagaggaaattaagaataagatggatgcttatactaagggcaatagtagtaagtatttatctgagcaaattgtgactattcgtgatgaccgctatgttattccagttaagcaagaatatcgggcaaaatttggtggggtagttcatgatcaaagtgccagtggtcaaacactgtttatagagccgaaagccgttttaaaccttaataaccgccaacagaatttaattgctcaagaaaaacaagaagttcgtaatattttgaagaacttatctaatttggctcgtgaagaaattactagtttgaataatattgcggctgcattaactgaactagatttcttgcaggctaaagccaagttagcaaaagaaatgaaggcaagtgagcctcgtctgacacaagaccattctttgaacttattaaaagcgcgtcacccattgattgacccagaaaaggtagtacctaatgacattcgtttaggtggtgaatttgatactatgctgatcacggggcctaacaccggtggtaagacaattaccttaaaaacagcaggattgcttcaattgatggcacagtctggattatttatcccggctgaagaaggtagcaaggttggcgtctttaagcaagtttatgctgatattggcgatgaacagtcaattgaacaatcgttaagtactttttcatcacatatcaatgacattattgcgatcatgaagaatgttgattctgagaccttagttttaattgatgaaattggtgcagggactgatccagaagagggtgctagtttggcaattagtatcttagactttttgcgtaaaaaagatgctaagatcatggtgacaacgcactatcctgaattgaagctttatggttataatcggccacggacgactaatgcctcaatggaatttgacttaaagaccttgtcgccaacttatcatttgcagattggtattcctggtcatagtaatgcctttgccattgcccgcaagctagggatgcgtgaagatgttgtcaaaaatgcccagaacttaatgtcagatgaagattctgatattaataagatgatcaccaagttgaatacgcaaaccaaggcagctactgtggctcgcaatcgtctgcaaaccagtttggatcggagccaaaaattggagcaaaagttgcaacaagcacttgattggtataaccaacgtgtacaaaaacagcttgattttgcacaagagcgagctaatgaagttgttgccaaacgccgtaaaaaagctgatgagattattgcccaacttgaaaaacaaaagaacatgggcgtcaaggaaaataagattattgaagctaaaggcgaactcaacagtttagagcgtcaggctaataatttggctcataataaggtcttacagcgtgaaaaacgtcgtcaccatgtaagtgtaggcgatcgagtaaaggtcctctcatatggtcagacaggtacgattactaagaagttatctgaacatgaatatgaggttcagatgggaattatcaaagttaaggttagtgatcgcgatattgagaggattgaaaagggcgaaagtactaagcctagacaaactgttagagcaaccagtgcggttagaagaagtaatgctcatagcgagctggatttgcgaggccaacgctatgatgaagcaatgactaatttggaccgatatattgattctgttttactggcaggacttgatacggttacgattattcacggtattggtactggtgcgattagaaaaggtgtttggcaatatctccgcagcagcaatcatgtaaagaactttaattatgcaccagctaatgaaggtggcaatggtgcaacaattgtacaattaaagtaagcgtcttacttgcaaaaagtaagtataatagaatatacttataatataaataaatgaattgaaaaaatgtgaggtaataattatggttgaagcaattaatgatcaaaattttgaagaagaaactaagaatggtgtagcattagtagacttttgggcaacttggtgtggtccatgtaagatgcaatcaccagtaattgatcaattatctgaagaacgtcaagacgttaacttctacaagatggatgttgaccaaaatcaagatacagctaagaatttgggtattatggctattcctactttaatcgtaaagaaggatggcaatattgtagaccgaattactggttacactccaaaagaaaagttaaaccaaattttggatcaatatactgattaatttaaaaatcaaaaaaggcttgagacgatgttgcctcaagcttttttgatatatcacttattttgatttacttgcttttttagcaagtcacgaatttcttctaaatagtcggcctcagttggaccagcttctttttctttcttgggcattactctatttaaagccttgatcattaaaaataccacaaatgaaatgatcaagaagttaatgacagaattgatgaagctgccatatttaaatgtagcatccccaaccttaaaaacgaggttagaaaaatcaattttgccggcaaagatcccaagtagggggttgatcaagttttttactaaagattgtacgatagcagtgaaggcagcaccgatgattacaccaactgccatgtccattacattgccacgtgaaataaactctttaaattctttaatcatgctctactcctatatctaatatacgcgtggtgctagttaaatcgttctaggcaatatgccatattataagctaaaatggctatttctagccgctgctgaaagccagctaagctccttgctcggttattttcagcgttatagtaactgagcaaagaaaagtcgctttcaattgttcttctaattgccatcagttgatgattattatgttttttagcacctttcatgttttttcgatatggtgtccaaaggacatagcccataccttttaactcggcagctaagtcttttcctaagtagccttcatcgcctaaaagataatggttaattggatgagcattaatcatcaattctactgtttctttggcatcatgcactgatgctttagtgactgcgtagtcaagcaaatagccttcatcgcttactagcgcgtgcaccttgaaaccataataatagactttcttggttgctttatagccaatatcggctatgtcacggaagatcttaacacgataattacgaacaggctgacaaactggaacaggaaaactgtcaataattaaaaattctccagcaacctttacctcttgattccaagcttgacggatgcagcgaattaaaggcaaaagcatcttggctcgacgattaaagcgagaatgagataagccaacaaaaaatttacagaatcttctttgggattcaattccaatttcagtttgccaaatgagcatcgctaagatggagctgtcggaaagctttgtttgatcaatgttttttcgatgcgtaagcttatcaggcgcataaagattatatagtgaacgacaaattacatttaaacgactaaaactaacttgtaaatggtgagagaaacgattaggcttgaggtagttcaattagatcagactcttttctatttaatttacttacaacttgagtctaatccgattggacttttttattaactaaaacgatttaactagcaccacgcgtatctaatatatctaaaaaaatgcgattttaactaaagtatatagtagtggttatttatagtctatcaatttgcttttaaccgaagcgagcgataaattgaactttcttttctttatctaaaatattaatttcacattcggtggttcgaccagttgatttttgaaatgcttccgcgatcattccgccttcaagggagaattccttgctggcgctattcaaacgatcagtgacagtttggccacttaattcgtaagtagtaaatgatcgtctttctttaactttttctagcttaccaaattcagccatgttgaagaattcaactaaatcatcataatcacttaaatcatattttcgcgcgattctcttgccagcccaataaagaattgaggcgtcatcatcgcctaaaatagttggcaaaaggaaatcgcggtaaagttggttaataaaatatacgtgctcgtttgtgttttctgtgttttctgtcataaacttgttcatcccttttattcttttttattttaccgtaaactagtagaagtagaaaataaatttttgattttaagagggttttattatggataatcgtccgattggattattggattcagggctaggtggcctatctgttgcaaaaaaagtaattgaaaaattgcctaatgaatcaactgtttttattggtgataacgctcatatgccgtatggcgatcgaactaaagaagagattattgaactagttagaaaatcagtccaatttttgttagagaaaaatgttaagctgataatttttgcctgcaatactgcgacagcaatggctatgagtacgattcaagcagaaatcgatccacaaattatcggagttattcagtcggggagtttggccgcttcacggacaactaagaataaaaaagttgcggtagtttcaactaaagcaacagcagaatcacatgcttatgctaaagagatccgtttccgtgatccagaaattcaggtaacggaattagctgcccctaaacttgcaccacttgtggaggctcaaaaagatcatgaaaccaacttaaaagtagttaaagagagtttgacccccttacaaggaaaagactttgacactttaattatgggctgtacgcattatccattgattcagaaagaatttaaagaagcaattaatgataaaaatgttactatcttggatcctgcagatcaagttgcacagtatacgtttaatgtgatgcggcgcgatggtttgtttagtgatggtaatgaaaaagtcagtcatgaatattacactacaggcgatccaactagttttgatcatttagcaaggacattcatggatgatgcaactttaacatctaagcatgtggatacggagaatgaataatggttaaagaaattttatttgcgactggtaatcaaggtaaagcaaaagaactaaaagaagcctttaaacaagctggggtaaatgtcgagattaagacgaatgctgacttagacaatccgcctcatccgattgaaagtggccatacgtttgaagctaatgccaagattaaggcccatgagttagctaactttagcaagttgccaacgattgcagatgattcgggcttaatagttgatgccttaaatggggagcctggtgttagaagtgcacggtatgcaggcgaagctcacaatgacgcaaagaacaacgccaagttattagctgaattaggcggtgtaccggatgaaaaaagaacggctaaattttggactacgattgtagtttcgatgccaggtgaatttgataaggatttggttgtgtcaggcacttgtagtggtcgtattttagctgcaccgcgcggtgaagacgggtttggctatgatccattgttttatattccggaaaaagaaaaaacttttgcacagatgactactgatgaaaagaatgagatttctcatcgtggtaatgcagtgcgaaaattgctccaagaattgccagcttggttagaacaatttgattagataaaaatagctcagttcgggtcattgatgtgtgtgatttgaactgagttatttttagtgaaatgaggtggatatatatgtcaaaaagtattggggaagtgctgaaagaggaaagacggtctttaggattaacacaggaacaatttattaaagggattattagtgaatcgttttattcaaaagtagaacgaggtaagaatgaaatagtagcagtagatttactaaagattttagctgctaataacattagtgaagaagaatttttaagtaaactaaatgttaaggaaaataataatttagaggaagacttaaaagttcaattacttaatgcatattctattcatgataaaaagaaaatcagaatgttagtccaaaaaatacaaaatgcagctatggatgaaaatactaaaatatcagctcgtttgattgatgcagttgtaaataataagattaatgatttaactcaaagagaaattacacaaattaagagaaaattttttgaagttgatgattggaccaaaaatattacaaccttacaacttttttgtaattcaatgcttttgtttgattttgatgagctggttctttttgtaaaaaaaatgaaaaaaacatgtaaagggaagttgatgaaattaccatttaatactcaaaagataattgcatcgatttgcataaattattttcataattgttatacaaatgattgtggtcaagatgcaagctatggttatgaaataatagaagaattagctaatattccggattttggaatatatgtgatagttactaatttttataaggcatattttcaaggcaataaaaagcaaagtcaacagatattagatttcttgaatcagaatggactaaacgaaatatctagcagattgccatagtcatatatgaagatctaattcaaatgtgaagaatttaggacaaatttaatttgttgcttataattttaattaagaaataattgattgggaggaaagtaattatgaattggcctaattttccacaattaccatagccttaataattatttctctgtatttttaggaggtgttatttatgtcagagtcagcattacttaacttagatattagtgaaagctcaatccaagcatttgatgaggtagaggtaagcaatcgctcaagatactcttcttgctcatgcattaacccaccgtgtcctattgcaacaatggattaaacaattgctacaaagtaagaatcaagaaagctcttaggaattgcctaagagctttcttgataatataaggagattggtatggaagaagtttgtgtattcccatttgtattttcgcgacaaccgattttgtctacagatgttttatttaagaaatttgataatttagatgagatagtagagttttatttaaacgaagatttagctcttaaagcacttcaagagagactgtaaaatattttgtgtaaggatgaatgattccttaaatttatttctttaaacattagaaaaaggagttcctttctcgtatgattggtttgaacaaaaaaacacatacagaaagaagaactccttcatgaatgattttaccaaagattttgctcaagctctattcaatccagacaaaataaatgatttattgcgcaaagagctacaacaggctgttaataacttgttagaagctgaattgactgcctttctgggctatgatccctatgccagaaatggctggaatactggcaactctagaaatggtgcttatttccgcaaagttgatacgcaatttggcccaattgaagtgcaagtgcctcgggatcgcaacggtcaatttcatcagcacacgctgcctggctacaagcagcactcggatatcttggaaagcatgattatcaagctttactccaagggcgtgaccaccagggaaatagccgatctaattgaaaagatgtatggcagccattacagtccagctcaggtatcaaatatttccaagcagatgattccaaaggttgaggcttaccacaaacgcaagctaagcgacaagtttttctgcgtctatttggatgcgacataccttcctttgcgccgagaaacgtttgagcgtgaagcagtctatattgccattggcattaaacctaatgaacataaagaagtcattgactactgcattgcacctagcgagaacattgaagtctggacagatatgcttcaaaacatgaaatcccgaggcttaaagcaagttgagctttttctttctgatggtgttgttggcatgaaaacagccttggccaggacttatcctaaagctcattttcaacgctgtttggttcatgtcatgcgcaatatctgcgctaaagtacgcgtcgacgatcgtgaaaagatcatgaacgaattcaaacaggtgcatcaacagacaaacaaagaagaagccacagctgtcctgcatgacttctataccaaatggggcaaggtttacagccatgttatcagaagcttgaaagacatagaaccagatctgctggtcttttataactatcccaagcagatcagagcttcaatttattcgactaacatgattgaatcatttaacaatgtgatcaagcgcaaagctaagcctaaggcagagtttccaactgaacagtcgcttgatgcttttattggcattcaggcaatgagctacaatgaccgttatttcaatcgaattcataaaggctttggtcaggttcaggacaccttagaatcctactttgattaaataaataattaaaaaatcaatttacgagaaagatctatttacacaaaagatttgacagtttcataaagttagagtatatggatgatccatttaagtattatagtattttaatgtcgtttattcatatgcatgttaatagatatttagcaccaagtaaaaaggaagaacaaaatatttatttaagtgtgttggaatattatcgaattaaagaggatgctaataaatatggaaaatttagaaagtaagatactttttcattcatataaaattggtgtaaatgaaagtaaatcttccttgaaagatattagtttggctgatgggttagctggaattagcatttttctatctaatttttataaatcagttgatgaaaacacggtaaagactaaaattcgggaaacgaatttaaaagtaatcaccaaggttgtgaaagaaattaatagtcaaggaacggttctatctttatttggtggtttaacagggataggcgctgcatgtatggaggctgcagaatatgataataaatattattcattattgattaaagttactaggactatagttgaaaaggtaaatattgtatttaccaaatctgatatttatactaatttaactttccaaatctacgatctatttaatggagcagtagggatatcactttttttagtaagagcatataaaaaaggagtagatgttcctgatatagaaaaggcaatacatcatttaactacatttctggtaagaatttcagtaattgatactaaatgtttttctaagtcattattatttttgcctgctgaggaattacctaaaagcggatatgcgcatcaactattgcctaaaggcgctttactaattggagaagcgcatgggttagcaggaattttagggtgtttaggtacaatttataaaatttttccatcttcacatttgaaggagcatattcagaatatattaaaatttttgcaggaaattagagatgacagggtattatatccagaatacgtattagtttcaaagaatgatactcctgagatagctactcataagcttaatgggggatggtgctttggatcattaggaacaacatactctattcttttgagttctgaaagcataagtgacgataaatttgttgatcaagccaagaaagatttgttttttcttcttagtaattggaaaagtgatattcgtagtgattcattgataatgtgtcatgggcttgcaagtcaaatttatattgctaatgtgttgaataaaacttatgatgacttgcattttgaaaagataattactaaaatgatagattttgttgtacatgcagcaaattggaaagagaaatatttattttcagatgttgcaatgtcactaaaaggtaaaaaaagatatgaaagagggatacttgagggagaattaggcgtaagtctagttttaaattcaatagtttctaatgttaaatggaatactgattggatgtttttgtttggatagaggtgaataaaaatgaaggcacaatatttccaagctaattttcggattgcacgtaagtctaaaaagaatatggtgcttgcggttttgttaatactttgtatgatcttttctgtactagttgtagaggagcaaaaaatcaatgatggctatcgtcaatggcgagactacaatgagtcagttcacgttaatgcagattatttttcgagtaatttattacggaaaaaggattacaaacagacctttaataatctgaacaaacaagcagaatatttagccggtgtacaaaatggtgaaatgttcgattcagctcaagattatttacaaaactctaaaaagttagttcaaacgatgctggcaggctatcaaaataattatcgtggtgcctcaactttaaatgttccgccaaaataccaactgtggcagaaattagtagtttatgattatttgtaccagaatcatttggcaattgtgatgaattctaaggagtctagcacctacttaatctacgttttaagtttaatcggaatgttcttatttttttacattctgtttattgctagcgatagttggatgattaatttgttgcatccaactttgctgaaaaatattccttaccaaattagggatgaagttaaaagtaaattcatcatcaatcttgtcctaactttaattccgttagtaattgggatgcttggaagttatttatttgctggttttaagaatggatttaatagcttgaattatccagcggttttgtactttactcgaatcagcgcggttccattatggttttattgcttgttgtacttggcttatgcagttgtgctcgttatatttgtaaccagcctagcatttctgcttaatcaactgactcatagtgtttatttaacgatttttattgccactctggtttatagtatttcgtttttgccaggtagtattgttaaatatcttttctttttgccatcggtttatttaaacattagtaatgtcctagatggaaccgtttcgagtcaagcaatagtaccaacaaatttaataacagggatgcttgttttactagtgtggactgtagtactgattatgtggtttagacatttggttaaccagggcggtgttaagaaatgaaaaagcagtattttttatttcaattaaaaatatttttgactaatcctaaaaatgttgggttgtttttcattactatcgtgctttcactatattttggactagttagtgctcctcaacaccttgtgattgaaaatgttgatccatatgcaatttctaaagaatatcaagatgatcaagcttttttaaaggtggctgaaaaagaatttgctcgagcaaataaaggaaactccagttttaatcccagcgaaggagccaaagatgctgttactacgtatccaactgttattaagtatgatcatgaaagactgaaggctcttaaaggcaataattggcatttgtacacgaagtacagcagtatgtggtacaagaaaatggatgatttaatttgggttaaagaaaatcaaaattatatgtatccgttagagtattaccacaataataattacaaagaagatggacactttggttatcaaagaacatttcatttctacgatggtttgcttaaaagcaaagccaaattaaacaaaaatgtcttagaagaacggactactttgcaaagattacaacaatcgctttctggctggacgatgattattttaattataattataattatcattttatttacggcagatatggtaactaatgatcaaaaatatcgtacagtagtaaagaatatccctctttctaaaagaacaattctttggttgaaaactgcagttattgaaataggagttttatttaattttttggttgcctttgcaatcgtaatattatgtacggctcccaaatatggttttggctctttgaatttattaacaccgatttacactggtcgcttatattttaaaacgccatttgtttatcagactctaggacaatattgtcttgagtttctattttttgcagttgttctcacctttatttttattagattgactttgctattgtcattgatttttagaaacgaatatgtagctgttattgttgctagtatttttgctatgagtgctaaagttctttatttttcattgggtatgggctttgtttatccatttttgaaacacttaccaatgacatattttacaatcggcgaaagtttgactagtaatttatcgtatttaatggactcaccaggttggggctttaatgatggaattattccgttagttacattagcaattgtaattgaattaactatttggctattttgtcagtttagaaaagtagtattagtgaagtaggtgaaaacatgttaaaaattcataatgttaaattagcttttggcgaacatgttgtcttagatgaaattagtttaaattttcaaataggaactatcgtaggtttagttgcaccaaatggtacaggaaaatccacactattaaacgtaattttacataatcttgagccacaagctggttatgtagaatatgatcatttacgttatcgcagcaatcgtgagattattaaactgcatcgactgatttgtgcttttcctgatcaaagtgatctgtttccatttatgagcggtagggatcatttaaagctttatgcggatctttggaaaaattcggataaaaatgtagataatattattaataaattacagatggaaaaatatgttgatcgcccaacacaaacttattctttggggatgaaacaacggctttgttttgccatggtggttgcagctgatacgccagtaatgcttttagatgaggtgatgaacggacttgatccccaaaacgtacaattgatttcagattacttattagatctaaaaaaagaaaataaattgattattatggcttcacatttgttaaataatctacaatcttacgcagatcgtgtacttttcttgaaggcaggaaaggtaattgaagatctcgataatcaacatcaggctaagcagtatctgaaaattgaggcgaatgcaatagccgggacgtggttaaaagataaaagatttactaagttacctgataataaaattattgtgccactggatgataatctaggattagatcaacttatacttaaattgactaaagagaagattccatattcagttggtcgaattgatttggcagaattatttagtaaattttatggctaaggcaatttgattagataaaaatagctcagttcgggtcattcgtatgatttgaactgagttactttttacttattttgcagtagtttttgcaggtcgttctgtacttgcaaaaacaatattattttctcttaaaatttgaatatattgggtcaaatacaaatttttcacagcagattgtttaccaggcttaacttgaaaatgaatggaataaacaaatttttttcctgtttgctcggtcacaccaacgatagtaggaccggaaacaattgtctttttttcaggttgaatcttacgattgcattctttgattaacttgttaacttcatcaatatcatttttagtatcaagatccaaattaatgtctaatgccacaccgccatgagcaagattttgcacgatcgtaatattacggttagggatgaaaataattgagccatctgaacctttcagccgcgtagttctaagacctaattggacgacagtaccaacattagtgccaatttgtaccaagtcaccgacatcaaattgatcttcacttaaaataaagaagccgttaactaagtcgctaacaaagccttgcgcgcccatccctaaagctagggaaaaaatcccagcactggctaacaaagtgccaaccggtacacctagaatagagagaataccgaataaataaaagaagattaaggtatattggaaaacgctgttgatcaaagcggtaatcgttcgcgttcgtttatttttaaccgtgttatgcttggctaagtaattattaattattttatgaccaaaatgggataaaaggtaaaaaatgagtgaagtaatagctaattgccaaataattgacaataaattttggctaattttactccaatcaatttcaattttctgtatatttatgtgagtaggaatcttcatttggtgtcctttctattgcttacgggtataattaagaataacaagacattaattgagaataaaggatattcatgctaaactttttttagatgttgatggaggtagaaaatgacaatttcttatggtgctttagcaggcttaattgcggcgattgcattcttaattttagtattatttacgattccaatgctaattcggaccgcgaagttgttgaaagaaactagtgcaactattcaaacaactaacgagtcaatgaagaaaatttctgaagatatggatggcttgatggatcaaacttcggatttgttagataaaactaatgacctaatgaccgatgttaatggtaaaatgaagacgttagatccagttgttaaagctgctgcagatttaggcgaaagcgtatcagaattaaacgattcatctaaaaagatcgctaaacgctttagcagcaatcatttaagccgtacgggtcttatttcttcaatagctgcgacggcatttgcaagacgcaagcgtcgcagaggtgaaaattaataaaggaggaattcaccatgaaaaaattcgcaagtttcttattaggtgccgttgcaggatgtgcagcaggttttctcgcaggttcacttcttgttagtgatgaacaagttgatgacgttaagaacaagattaaagataatgacaagcttcaagatttgaagaagaaatacgataatggtactgaaatcgtcaagaatcaattagcatcattccctaagaatgttgaagatgattcagaattgaaggattttgacgacatcgtaatcgatgactcaaataaagatgacgatgacagtgaaaatgctgaagagtcagttaacgatttgaacaatgctgaaaaagatgatactgatgcagcatctacttcagaaaaaccacaagcttaattaaagtcaaaaagaaaaggagctggtcgtgatgatgatacattccctgtcaagtagacagtagaattacataaagcttttattcctcagttgattaataatcagctgaggattttttggcttctcttattttcttttcgtgtattttttgccagtatttctcaattcgatgatttggtgcaatagggcaattcttaatattgcctttcatcgcttctttgcgcctttcaccagcagttaaaccgttaaaacgtttctgtggatcttcattaatgtagtaatctattgtcttacaaatagaatcattaagttcatcataactggccacttgaggatgaagaataactcgcatttctttgataatgccttgccagccttccattggaccattatcaatacagcagccaacacgagacattgattgcgtcatgccttggtcttttaattggttttggaaaggtgcgcgagtaaattgaaaaccacgatcactatggaaaagcggatgagcattagggtatgctttaacagcctgcttataggctgcttgaactaaagcagtatcgtttcgtttactaattgcgtagccaacaggatagcgatcatatagatcaaacacagtacatagatatgccttaggcaggttagcagcaacgacttcagtgatatctgtacaccatttttcattaggtctagatgcattaaagtctctttttaacttgttttcggccgttttctcaggcgttgtatgcttgaactttagcttctggtatctaggcttttgtgatctaatgccattgatacacatcaagcggtaaacagttttatgataaaccggcttttcatcagacatctgtcgattaactgccatggtcatcttttccgtcccaaacagactgttgttagacttggttatttcaatgatctttgcttcaatctttttgtctcgttcttcacgcttactcggcttgcgcttaggatcaaagtatttgtaataagctgagcgtgctattttagcccatttgcacattaaatcaatcttccaattgtacttttgatggcagtcatggattaactgatatgtttcttgtttccagcgtctttttattgcggcttgtctgtatcttggttgtccggcaagcacatcctttctaactgatctaatttttttaggaattcgttcttagtttgttcttctttgagctgacgctctaattccttaatttttcgattagccagttctaactcagttagctcttctggcttcttatgtctgcctcgtttatctgttaatcctgtttcaccattagctagatatttgtgtgtccagctgtaaacctgctggtaagaacaatcaaatttgacagctgtttgagtgtaattcttgtcgtgattaagacagtattgaacaatctgaattctttcttgctgggtagtttttcttcttgctttagtcatatagacctccggatggggatcatagtcccgattttctatatgactattatacttggaaacccattctgatactgttccattgcttctaatgccatatttattagctaaagaaggtaacgacattttgccagctaaatattcttgaacaaccttttctttaaatgccttagagtaatgattattgtattgagcattacttagaagggtatcacgattgctttgatattgatgaacccatcttcttacttgcatcgctccacttttacttggcatcttaagccgtttagctatttcaacgctgctcctattaccattcaagtattgttcaactgcccatatcttttgatcgaatgaatatttactttttctggacataaaaaatcccacctccatggataattgaatactttatgtatttcaatcgtccactttagtgggattgtatcatgatcagctccttttttatgacaaaattagtctttaagtggcaaaacttttaagtccttgtcagtgtgagtaaaggtttcaaagccatccttagtaacgacaccacaatcttcaattctgacaccagcaaagccagggatgtagatacctggttcaatggagaagcacattccttcttcaagaactaagtcgttaccttgtacgattgatggatattcatgaacgtttttaccaatgccgtgacctaggcggtgaatgaagtattcaccatagccagccttagtaatgatgtcacgagccacgctatctaattcttcagcggtgattcctggcttagcagcttcgattgcggcttgttgagcttcacgatcaacttcataaatttcgcgttgcttagcagtaggttcaccgtaagcaacagttcgactagaatctgatgcgtaaccatcgtgcatggtacctaagtcgaataaaactaattcatttggttgaacagtgttcatagttggaccaaggtgaggattagcggcgtttttaccagcttgtacgatggtttcaaaactttcatgcataacacctttttgaatttttagttggtaatcaatttgaccagcgatgcttctttcggtgacgccagttctaattgcgtcaaagccaatcttaaaagcgaagtctgcttctgcaccagcgccttgcaacttcttgatttcttcaggtgtcttgtaaagacgaattttttcaataaaaggtgaaacatcattagtaaaactagcgttaggaaattcaccacgtaagagttggtagtgggcaacagacaaatcatctttttcaattgcccaattatgggtatcgtgagttctctttttgacattagttgcgatgatgctccaaggattctcggaatcaagatagccgataacatcgccatcccatgcagatgcttttgcttcttctacgtttaaagctgggcagaaaataaatggttccgcatcttttaaaacaattaaagcaaagattctctcatgtggttccattgagtaaccagtaaagtaggaaatggtgattggattagaaatgtaagcaagatcattattggagtcttgcaaccattgttgtaatttatctaagttcatattgtcctcttttcttgcaaattatgtttactgtagtatatcatgatctcttaatgaaaaaatgaaagaaaagctgtaaacgtttgcattttatgcagcatcgtgatatctttaagtgaaggattttttggaaggactgagagataagagatgcataaacaagaagttacaatctatgacgtcgctcgggaagctaaggtttcaatggctacggtttctcgtgttgtgaatggtaatagtaatgttagaaaagagacacgtgaccgtgttctcgaagttattaaaagactgcactatcaaccaaacgctgtagctcaaggtttagcttctaagcggactactacagtagggttaattgtcccagatttaactaatttatactttgcagaattatctaagggtattgatgatattgcacttttatataaatacaacatcattattactagtattgaaaaccgcttgatgaaggaagaccaagttattcaaagtttgctgaataagcaagttgacggtgtaatttatatgtctaaccgtttatcagatgcagcagctgatgcctttaagcggactgatactcctgtggttttagcaggtactaaagacaatcgtgatgattttgcttctgtcacaattgactataagaaggctgatactgaagcattaaatttgatgtaccatgatggtaagaagcatttgggaatcgtagttggtgatcaagatgctgtagttaacagcgaaaacagaatccctgcttatgaagaattcatggaagaaaatgatttgggcactcctcgaatctatactgatattaaagactattcagatggttataatttatacccacaattagttaaagatggcgttgatggtgtaattgttactcgcgatatttcatcagttggtattttgaattctgcgatggatgcaggtaagaaagtgccagaagatttggaaatcgtgaccgccagtgctacgcagttagcttctgttgttcgtccagctttgactacgattaagcagccactttatgatatgggtgccgtagcaatgagaatgttgactaagttgatgaacaatgaagaagtagatgatactcatattgttttgccatatgaattagttaaaaagcaaagtactttaaatcaataattaagtgaagcaaaaaagaccagtttactggtctttttgttttagtagataattttgttaatctgttgaagcttttgtgtaaaagtggttggtgcaattgcttgattaggattatagggcaaaagcacgagattagtgtactgactgacccgtggtaaggactgataatctctgaaatcgtcttgactaaagaagccatagaacaagatatcttttgccttaacccaacctagtttggtataaatccacatgtttttaggactaccattaaaattttgaatttttaataattgatttgcgggtaatttttgctgcgttttggcttggttatcaggataacgataaattgtaactttttggttaggtttagcgataattttcttattttgataaggagcaatatctcgctttgttaagtcaaaattaacgaattctgccgaaataaaagttttttcagcaatttgataaaataagcgatcatctacacggacgccataagtgacattgactttttgacctggttgcacgtacttcttttctttgatgcgaacatacggattcatcattgtagcggctttagttttaccaaaataaattccagttctattaatagcgtactttttagtgccacttttggctaatttatatttaaaaccagtagcgggatagttggtaaccacgccatcaacattccgattaattagccaatgccatagggcaggcgattcgtccatttcggcccagacaaacagttgcttatgtaatttgtgaagccagtgaattaaaaagggatgctcttgcacaatgtcagaagaagcattgatagcattaacttgaggtaaattactgaaattaatgcgtttcaggctaccaacgatcaaaattagataagcttcaggcataatttttctaaagtgaaagagactagcagcggaaaatgaatgaatcatgattcttttctgcatatggtattttttaactatttgtgcgattttatcctctaactcataggacggatttaatccatgatcaattttagtctctaagacaaatttagtgtttggtttattttgataatgcttaaaaagctcactgagtgacataacgtgttcgccattgtcatattgcagttgtttaagtgctgtaaaattattttgtgatacaattgcatgtgtatgagtaactcggaagaggtcatcatcatgtgcaatgaccggaactccatcctttgagagctggagatcgagttcaacgtaatcagcaccagaattaaaggcggaatcgtcagcctgaattgtttcttcaggatatttgatgggatcaccacggtgccctacaactgtaaaaccactatttatgaaaaagactaagctaaaaaaaagaacccaaacgagtcggcttttaaatttcatgtgtacacctctatcgcatacttaacaatagcatggttacacatttttttctatttatagtactattcttttatcagtaatcggtatgattgaaatctaaaggatgagatttaatggaacaattggacttaattgaagaagttaccagaaatgatggcagtcgatattatgaaatctctaatattgaccaaaatggaattgcagaattagctgcagatcatggcttaattaaaaaagtcaaaatactgcatctgaatattcctcgaactaaggcactgattgcttatgaaaaatatatcaatgatacttatgacttgcagactttgactaatgaaagtgattggaaaaatccaaaatgggtagaatgggataaacctaagggaaaaattttagacgcatataatatgatcttaaaagccaatcgaattggttagaaagtggcataaaaaatggaacaactgcgaattttacataccaatgatcttcattcacattttgaacatttccctaaaatcggacgttacttgaaaaaagcgcaggctgatcaatcggttgatggtatctacacttttgatgcaggagactttatggatcggtctcatcctttaactgatgctacggaaggtcaagccaacatcaaattgatgaatgggtttaactatgatgcaattacgattggcaataatgagggaatttctaatccacattgggtattggaacatttatttgatcatgcggactttccgacagttttagcaaatttgcgtgaagaagatgaatcaatgcctaaatgggcagtcggccatatgtttttaactactaagaaaaagacgcgaattgctttaattggcctgactgcagcttatccaatgacttatggtcctaatcattggcatgtcaagatgttaggtgacagtatggatcacgaattagctcaaattgaaggaaaatatgatgtcttaattttattgactcatgttggattaaaaatggatcgctggttagctaaacattatcctcaaattaatttaattgtaggaggccacagccatgatctgattgaacatggtgaaaaagtggggcatacttggattacgcaaacaggtaaatggggaaactatgtgggtgatattcatctagaacttgaagatcatcacgtgattaaggtagtacctcgcactatttctactgcttcgatgccagaagaaccggaagataaggcagtgattcagggctactatgatgaaggtaagcgacttttatcagaacgaaaagtggctaatttacctgaaaaatttgcggatgataaagtagcagccgttcaagtttctcttgatgcgattgctgattttgctaaaacagatttagccattttaagctcaggcctattcttgaccccgtttaagagtggaataattactcaatatgatttacaaaatgccttaccgcatccaatgcacgttgttcgttcaaccttgaaaggttatgatttgtggcgactagtgatggaaattgaaaagaatcggcattacctagaccattttccactgcaagggatgagttttcgaggaaaaatttttggtcagatgtattccaaagggatcaaggttgatatgcgtagacgtgtagtttacgtcaatgggcatgaaattgatccacaaaaagaatataaaattgcctgtttggatcattatgtcttagttccattttttccaactttggctattgtcggtgaaaatgagtttttattcccacaatttttacgtgaagttgttggtaaatatttggctgaaaaatatcctttaacagcgagaagtgaaaaagatgactgaagaaaataaatttgaacaagaacagccaattagacacccacttgctgacgtggtgcaagatggtaagagcattaagattggtgcgcagctttatagcatcattgtcaatgagcgagacgcacttgatttagaatctttgcgtaaaaaatatgatccttatcttgaccagtatgattatctggtgggggacgtttctagtgaacatttacgcttgaaaggcttttataaagacggtgctagaaccgcaattgataaaaaagaaatggcgatcgtggattatttaacggaatattgtaatcccggcggaccttattttatcttggaattaacgcatccagtacattattatcagcatcaacgtactaaaatacggcgatcacgtgaacgacgcgagcgcgattttggtaaaaatgagcgttatcatgcacgacgtcgaaattatcggaagaataaaaatgaaaataatccgtttaagaagcggcgtgttcatcaaactaaatttaagaaaaaacaatcaattgcagtgaaaaaagaatttggacggcatcattcatttattattaaaaagagaaagggaaactagtgaaagattaccgggtatttttaattgacttagacggaactgtttatcgtggtaaggaaacagttgaatcaggagtaagatttgttcatcgtttagttcaagcagggaaagactatttgtttttaaccaacaatacgaccagaacaccgcaaatggtagttgataaactaaagggacacggtatcgaaactgatacggaccatgtttatacgccaagtatggccacagctagctatattttacaaagagaacacaaggaaaagatcggcttgtatattattgggcagattggtctctggcgtgaattattgcaacatccagagtttgagcttaatgaagaaaatcccgattatgtaattgtcggtatggatacagatctgacttatcataaagtacgagtagcttcacgggcgattagacgtggagccacttttattgggactaatgccgatatgaatttaccagcagaggatgagctaattccaggcaatggttcacaatgtgcattcgttgctgcagcaagtggagtagagccactgtatattggtaagcctgaatcaattattgtaaaaatggctttggataaagttggctatagcaaagatgaggcacttttggtaggtgataattacgataccgatattaaagctggctttaatagtggagtagatcagttgttgactttgacaggtgtgacgaccaaagtggatattgcagataaacgtcaaccaacaattttagttaataacctagatgaatttgaattatgattactaaaaacaatattttttcgctgatttatcattttttgtttgctgtttctagcagtgtaattggggcaattgtggctagttggccattattgtttatttttatgatcgtacaaaagacatatgagacggttcacatgtctttgtttaaggtaatgcataattataaccagctgatgttttatttgctctggccctttaaaaagcagcttaaaatggataatttccctacatctgctaatgcggcagaacattttgcggaatgtaagcatttatttattctgactctattagtttttattatctgcatcatagtgcactttgtttttaaacgacaaaagaaaaagctactgcttaatttggataaatcagtagcccttattttgctattattgccaattattatttttccatttgcagtaaccaatttcgacagtttctttgtgatttttcaccatattttgtttaacaatagtgattggctgtttgatcctaatactgacccaattatcaatgtgctaacggaaggcttctttgcttcttgttttgccgttgctggggttatttatgaattatattttgctgaaaaattattacgtaagtaaaaaagagttccttagtggaactcttttttgagtgatatttttttcttgattgcgacaattgcgattggcacaactgatactaaaatgatagcaattacgatcattgaaaaatggtcctttacaaatggaatattgccaaagaagaaaccgatgattgtgaacaatcctgtccaaagcaagccacccaagatgttgtaggtgataaatttaccataatgcatcttactgccgccgaaaatgaatggaacaaaagtacgaataaatggtataaatctacctataatgatcgtaattggtccgtggcgctcaaagaacttttcagcggccaaccgattattttgattaattaatttattgaaccagctatgtttttcaccagctctggttgaccaggcaccaatttcatagttgatactgtcaccgattatggcggcgaatgctactataagataaactagccaaatatttaagccatacttaggattagcagccattgcactcgcagcaaaaatcaacgaatcgcctggaagaaatggaaaaacgactaagcctgtttcaataaaaatgatagcgaataagattaaataggaccaaccaccgaattggttaacaatcgtgattaaatggtcatcaatgtgcaaaataaaatcgattaaactcatctggaactcctaaaaactagttgaatgaattggcaaagttttttcagggaaaagatcacgcataatcgcggtgattgcaatctgggcttcgccaaaaccgagagcgattaaagggacgcgtccaggataggtaacaacatcgccagctgcataaacagcggcgatattagtttgcattgttgaattcaccttaatttgtgcgccagctaaatcgattccccattttttgacaaagcgattattagctttaaagccatatgcaacgactgcttggtctaacttgatattagttaaactatcttttcccatttcttttaaattaacgttcagttgattatcaaccaaattgatttgtttaggaagatagggagttaaaatttcaacattttttaaagacttaagttttttgacattagattcaagaccgcgaaattgattacggcgatgaatgattttgacattggcataattagctaattctagtgccaggtctaatgctgaatcgccgccaccaaagacgccaactgtttgtccgacaaattttgggggatctttaataaagtaatgaatccttttttgagtatcatcatccatagataatggtaaagctttaggtttaaaggcaccggcaccagtggtaatcaatatgctgcgggatgcaactatatcatcgataataaagccgtctttttgtttagtgacattttcaactttatggttagtaaaaatagttgtatccgttaaattatgtcgtaaattgtcgattagttcagttcctgtaatagagtcgtaagcaggaatatctttgattttcttaaaaggataaagcatttgtggctgtccgcctgtttcagataatgaatcaaacagtacggtcttgagtccatgaagatgggcaaatcgcgcggcaaataggccaacaggtccgccaccgataatagttaaatcaaattttttaattttaatgacctcctcaaagtagtgatgtatcaactttaacatgaattttgtaaatattcatttaaaaataagcttgtcaaaaaatgaattttaaggtatattattgaagtcgcctttttaagagcgagcataattctttattaaaaaaaatacttgcaattaatattcaagtattatatattaataaagtcgcttcgagagatgcgacgagagcttaaaaacagacatgcaaggaaagaaaacaaataaaaagaaaaaagtacttgcaaagaagtaaataagctggtaatatatttaaatgtcgtcaggtgaaagcagaaaaagcttgagcaagacgaaaaaacaaatcaaaaaagttcttgacaaagaaatgatggtttgataaaatataaaagctgtctgctttgcaaaaaagcaagacagaggtagtactttgaaaaccgaacaaagtttcgctaaaagtgtgtgggtgtaaaaacccaaacaagaagcgaagtcaattcgcaagcaataaatttgagacaaagatcttaaataaggaatgagcaatcattcaaactttttaaaatgagagtttgatcctggctcaggacgaacgctggcggcgtgcctaatacatgcaagtcgagcgagcggaactaacagatttacttcggtaatgacgttaggaaagcgagcggcggatgggtgagtaacacgtggggaacctgccccatagtctgggataccacttggaaacaggtgctaataccggataagaaagcagatcgcatgatcagcttttaaaaggcggcgtaagctgtcgctatgggatggccccgcggtgcattagctagttggtaaggtaaaggcttaccaaggcgatgatgcatagccgagttgagagactgatcggccacattgggactgagacacggcccaaactcctacgggaggcagcagtagggaatcttccacaatggacgcaagtctgatggagcaacgccgcgtgagtgaagaaggttttcggatcgtaaagctctgttgttggtgaagaaggatagaggtagtaactggcctttatttgacggtaatcaaccagaaagtcacggctaactacgtgccagcagccgcggtaatacgtaggtggcaagcgttgtccggatttattgggcgtaaagcgagcgcaggcggaagaataagtctgatgtgaaagccctcggcttaaccgaggaactgcatcggaaactgtttttcttgagtgcagaagaggagagtggaactccatgtgtagcggtggaatgcgtagatatatggaagaacaccagtggcgaaggcggctctctggtctgcaactgacgctgaggctcgaaagcatgggtagcgaacaggattagataccctggtagtccatgccgtaaacgatgagtgctaagtgttgggaggtttccgcctctcagtgctgcagctaacgcattaagcactccgcctggggagtacgaccgcaaggttgaaactcaaaggaattgacgggggcccgcacaagcggtggagcatgtggtttaattcgaagcaacgcgaagaaccttaccaggtcttgacatctagtgccatttgtagagatacaaagttcccttcggggacgctaagacaggtggtgcatggctgtcgtcagctcgtgtcgtgagatgttgggttaagtcccgcaacgagcgcaacccttgttattagttgccagcattaagttgggcactctaatgagactgccggtgacaaaccggaggaaggtggggatgacgtcaagtcatcatgccccttatgacctgggctacacacgtgctacaatgggcagtacaacgagaagcgagcctgcgaagacaagcgaatctctgaaagctgttctcagttcggactgcagtctgcaactcgactgcacgaagctggaatcgctagtaatcgcggatcagcacgccgcggtgaatacgttcccgggccttgtacacaccgcccgtcacaccatgggagtctgcaatgcccaaagccggtggcctaaccttcgggaaggagccgtctaaggcagggcagatgactggggtgaagtcgtaacaaggtagccgtaggagaacctgcggctggatcacctcctttctaaggaagcgaaggatatggagagcaggaatgctaagagaagtatccagagcaagcggaagcacactgagaaactttgtttagttttgagggtagtacctcaaagatttgaaaaacgccaagcgttagtcgggcctatagctcagctggtttagagcgcacgcctgataagcgtgaggtcgatggttcaagtccatttaggcccattgacataacgaagaaaaagagttaaagttatgtctggccgaaaataaaatactctgggggcttagctcagttgggagagcacctgctttgcacgcaggaggtcatcggttcgaacccgttagcctccattgatccagagaaaggatcaaagagctagtacattgaaaactgaatataatccaagcaaaaaaccgagacaatcaaagagaacagattgtagagcgaccgagaagagaattcttgagtaaggtcaagtagaaaagggcgcacggtgaatgcctaggcactaacagccgaagaaggacgtgacgaactacgaaaagcttcggggagcggtaagtacgcagtgatccggagatatccgaatgggggaacccaatgcagagatgcaatattgattagtgaatagatagctaatcaaaggaagacgcagtgaactgaaacatctaagtagctgcaggaagagaaagaaagatcgatttccttagtagcggcgagcgaagaggaaagagcccaaaccaagtgatttatcatttggggttgtaggactgcgacgtggcagtgtaagagatagttgaattatctgggaaggtaagccagagagggtgagagccccgtaagcgaaatctcaagcacgcctagcagaatcctgagtaggccgggacacgaggaatcccggttgaaaccgcgaggaccatctcgcaaggctaaatactagttagtgaccgatagtgaaccagtaccgtgagggaaaggtgaaaagaaccccggaaggggagtgaaaaagaacctgaaaccgtgtgtctacaagtagtcaaagcacattaaagtgcaatggcgtgccttttgtagaatgaaccggcgagttacgttatctagcgaggttaagtcagaaaagacggagccggagcgaaagcgagtcttaatagggcgaaaagttaggtgacgtagacccgaaaccaagtgacctacccatgaccaggctgaaggtgtggtaaaacgcactggagggccgaacccacgtaagttaaaaattgcggggatgagttgtgggtagcggtgaaattccaaacgaacttggagatagctggttctctccgaaatagctttagggctagcctcgtggagaggataatggaggtagagctctgtttggactaggggcccgtcaggggttactgaatccagataaactacgaattccagatatccatacacgggagtcagactgcgagtgataagatccgtagtcgaaagggaaacagcccagatcaccagttaaggtcccgaaatctatgctaagtggaaaaggatgtggagttgcgtagacaactaggacgttggctcagaagcagccatcattcaaagagtgcgtaatagctcactagtcgagtggcgctgcgccgaaaatttaccggggctaagcatagtaccgaaactgtggatgtgttttaaagagcacgtggtaggagagcgttctaagagcggagaagttgaatcgagaggatcaatggagcgcttagaagtgagaatgccggtatgagtagcgaaagataggtgagaatcctatccgccgaaagactaaggtttcctggggcaggctcgtccgcccagggtaagtcgggacctaaggcaaggccgagaggcgtagtcgatggataacaggtagagattcctgtactgtgtcaaatcgttaagagcgaaggagggacgcaggaggtgaagcacgcatcgcgatggaacgatgttcaagcaacaagtgcggttaagagtcaaatgcttctaaccagcaacacgagttgtgaagaggagtgaattaaaagtagcgaaggtgtggtaatcacactgccaagaaaagcttctagccagagatgacatacccgtaccgcaaaccgacacaggtagtcgagtggagaacactaaggtgagcgagagaactctcgttaaggaactcggcaaaatgaccccgtaacttcggaagaaggggtgctagccaagagattggttagccgcagtgaataggcccaaacaactgtttatcaaaaacacaggtctctgcaaaatcgtaagatgacgtatagaggctgacacctgcccggtgctggaaggttaagaggagagcttagcgtaagcgaaggtttgaattgaagccccagtaaacggcggccgtaactataacggtcctaaggtagcgaaattccttgtcgggtaagttccgacctgcacgaaaggtgtaatgatttgggcactgtctcaacgagagactcggtgaaattataatacccgtgaagatgcgggttacccgcgacaggacggaaagaccccatggagcttcactgtagcttgatattgagtatcttttaaacatgtacaggataggtaggagccagagaagataggacgctagtcttattggaggcaatgttgggatactacccttgtttgaaggatgctctaacctcgacctgtaagccaggccagggacagtgtcaggtgggcagtttgactggggcggtcgcctcctaaagtgtaacggaggcgctcaaaggttccctcagaatggttggaaatcattcgcagagtgtaaaggtataagggagcttgactgcgagagagacaactcgagcaggtaggaaactaggacttagtgatctggtggtaccgtatggaagggccatcactcaacggataaaagctaccctggggataacaggcttatctcccccaagagttcacatcgacggggaggtttggcacctcgatgtcggctcgtcgcatcctggggctgaagtcggtcccaagggttgggctgttcgcccattaaagcggcacgcgagctgggttcagaacgtcgtgagacagttcggtccctatccgtcgtgggcgtaggaaatttgagaggagctgtccttagtacgagaggaccgggatggacgcaccgctggtgtaccagttgttccgccaggagcatcgctgggtagctatgtgcggaaaggataagcgctgaaagcatctaagtgcgaagcccccctcaagatgagatttcctttgcgtaagcagtaagacacctcagagacgatgaggtagataggctgggagtggaagtcctgtgaaggatggagcggaccagtactaatcagtcgaggacttgaccaaagcgaagcaaactggaaggttttttgcgagaaggattatgtttagttttgagtgtaaaagctcaaaagagtacggtggcgaaagcaagaaggatacacctgttcccatgccgaacacagaagttaagcttcttaacgccgaaagtagttggtgggcaactgcctgcgaggaaaggaagctgccgtgctcaatatggaggattagctcagctgggagagcatctgccttacaagcaggaggtcacaggttcgagccctgtatcctccatatcgagtcgttagctcagttggtagagcaacggacttttaatccgtgggtcgagggttcaagtccctcacggctcatgaccctatatatgcgggtgtggcggaattggcagacgcgctagatttaggttctagtgttttcggacgtgtgggttcaagtcccaccacccgtattgccaaccacatattgacaatatgccgatttagctcagttggtagagcatctgtcttgtaaacagggggtcgtacgttcaagtcgtataatcggcatttatattacgcggaagtagttcagtggtagaacatcaccttgccatggtgggggtcgcgggttcgaatcccgtcttccgctttcatcaacacgccggagtggcggaattggtagacgcacgggacttaaaatcccgcggttggtttcaaccgtatcggttcgactccgatccccggcattgatgatgcgcccttagcgcaactggatagagtgtctgactacgaatcagaaggttgaaggttcaaatccttcagggcgcatataacgggaaatggctcagtttggtagagcacctggtttgggaccagggggtcgcaggttcgaatcctgttttcccgattgtaatctaatggtgattggttacattttggcggtgtagctcagctggctagagcgtccggttcatacccgggaggtcgagggttcgatcccccccgccgctataattgtaagcttggacctttagctcagttggttagagcagacggctcataaccgtcctgtcgtaggttcgagtcctacaaggtccataatatggcttttatattaatatcgcgggatggagcagtctggtagctcgtcgggctcataacccgaaggtcgttggttcaaatccagctcccgcaatttggtccattggagcagtggtttatctcgcctccctgtcacggaggagatcatgggttcaaatcccatatggaccgtaagatggctcggtagctcagttggtagagcaaaggattgaagctccttgtgtcggcggttcgattccgtcccgcgccatttcattttatattaggtgcgggtatagtttagtggtaaaacgaaagccttccaagctttagtcgcgagtccgattctcgttacccgctttatatgggcctatagctcagctggtttagagcgcacgcctgataagcgtgaggtcgatggttcaagtccatttaggcccattggagacatactcaagtggctgaagaggcgcccctgctaagggtgtagatcgggttattccggtgcgagggttcgaatctctctgtctccgctatatagaaaagtaactgttctagattaatttctagagcagtttttttgtgtaccgagcggcattcttagtccgatgaaagtgttagaactaagagccagtagcaatgatattatgagtatgggacgtttacaaaggagtaaatacctgctgaaacagtaaggaattacaaatgtatcgtcttatatgcaaccatatgtatagtggatggaaggagatgagttcgttaagttctctctgcattgaaaacacgtcataagatgttaaaaccttaattttgagttattgataaacctaaatgcatattattttgaatgacttaatggaaattattacacttcttttaggtaaaagtcttggacattgattcaagtcaataatcgtgtatataacatagggagagccgattgttttaaatttcttcttgtatgatctatattaaaaaaataattttgtgggggatttcatagtgatataaagaagcagtttaatatggaacaatttataaagatcatttagttaaagataagagaagctgttttgctctagctaatttgaagtattaagatagatataaatgttttacaacaaaaaaataaaaaagtacttgcattttgactgaatatctattaatattaaatacgttgtgattgagagatcacaatagtaatagctaattaaaaaaataaataaaaagttcttgacttttgaaatgtgattagttattataataaagtgctcttgactgagttacatgacccgttggtcaagtggttaagacacggccctttcacggccgtaacatgggttcaaatcccgtacgggtcattgccacaatttatttttttggcattaagcaatggaggattacccaagtggcttaaggggacggttttgaaaaccgttaggcggttctgccgcgcgtgggttcaaatcccacatcctccttagttgaatatcgcgggatggagcagtctggtagctcgtcgggctcataacccgaaggtcgttggttcaaatccagctcccgcaatttggtccattggagcagtggtttatctcgcctccctgtcacggaggagatcatgggttcaaatcccatatggaccgtaagatggctcggtagctcagttggtagagcaaaggattgaagctccttgtgtcggcggttcgattccgtcccgcgccatcatctggaggagtagcgaagtggctaaacgcggcggtctgtaaaaccgctctctctgagttcggcggttcgaatccaccctcctccataatagggatatcgtataaaggtagtacatcggtctccaaaaccgctagtgtgggttcaattcctactatccctgtttaccttcatggcggaattggtgaaggggttaacacactggtttgtggatccagcatgcgtgggttcgattcccacattccgccctagtattgggatatagccaagtggtaaggcattagactttgactctaacatgcgctggttcgaatccagctatcccaattctaaataatttcataacttatggcggtgtagccaagtggtaaggcagaggtctgcaaaaccttaatcgtcggttcaaatccgacctccgccttatcaaccgaataagttgattattttaaaatttaatattatggcggtgtggcggaattggcagacgcgtcagactcaaaatctggtgtccattacggacgtatcggttcgaccccgatcaccgctattattatgaagcgatccaattattggatcgcttttttttttattttaaaatgttagcattttattatataaattgcacatgaatacaggaatctttataatgctacatatggaggtactcaaatgaatattggtctttataccgatacatattttccccagataagtggcgtagctacttcaattaaaacgttaaaagaagcgttggaaaagcaggggcataatgtatttatttttactactactgatccgaacgtgaaaaaaggaactgtagaaccgaatgtatttcgttttagcagtattccttttgtctcatttaccgatcggcgaatagcatttagaggactatttgaagcaaccaaagtagctaaagaagtcaatcttgatatagttcatactcaaactgaatttgcattaggtactattggcaaatatgtagctcatcaattagatattcctgctatccacacttaccatacgatgtatgaagattacttgcactatattttaaatgggcatttgcttcgtccatatcatgttagacaatttgttaaaagctatttgaaaaatatggatggatgtattgctcctagtggccgagttgaagaattattacggcgctatggcgttcaaataccaattagggtgattcctactggagtagatttgcagggcatgaacaacgatattcaacgtgatgtgcggcaagaacttggaattgatcaagatgcgcctgtaattttaaccttaagtagaattgcagccgaaaaaaagattaatcatattttgaacgtaatgcctgaaattattgatgaatttcctaatgtgaaatttgttatcgcaggtgatggccctgatgttgatgtgttaaaggatcaggtagagcgattaacactagagaattacgttatttttgtcggtaatgtagagcatggcgatgttggtaattattatcgaatggctgatctttttgtttcagctagtgatacagaaacacaggggttgacttatattgaggctctagctgcaggtacgccatgtgtggtttatgacacagactataccgaaaacatttttgatcaagatatttttgggcagacatttactacacaacaagaaatgttagaagagattattactttgcttaagcaagggacgaaaagaatcccgcaggaacttttgcaaaataaattacagaagatttcagctgatcaatttgctaaaaatgtgtctgatttttatcagtatgcaattgatcactatcaacctaagcatgatgaggagactaaaaagaggaactaaatgattagaattaatatgttctcgcaagctgattctgttaaaggacagggtgtaggttcagcttataatgaattgattaaacttctgaggacgcacttagtagacgaattttatgtaacgattaacaaatatggcaatagcgatttaacgcattatcacacgattaatccaacctattacgcaaatagttttttaccagcacgtggcaggaagattggctatgttcactttttaccagatacattagaaggctcaattaagttgccaggcgtagctaaaaaagttttttatcaatatgtaattgatttttataaacgcatggatcaaattgttgtagttaatccaatctttattgataagttggttaactatggaattgatcggaacaaggttagatatattcctaattttgtttcaaaaacagaattttatgaagaatcattggccagcaaaaacgcatttcgtcatgaattaggaattccacttgataaatttgttgtttttggtgatggtcaagtacaggaacgcaaggggatcgatgactttgttaagatggcacaagctaatcctgatattcaatttatctgggcaggcggtttttcgtttggcaaaattactgatggctatgatcattacaaagaaatggttgacaatccacctaagaatatgacgtttgcgggaattgtagagcgagagaagttagttaagtatttaaatattgcagacttatttgttcttccatcatatgatgaattgttcccaatgtcagttttggaagcattcagttgtggaacaccagtattattgcgtgaccttgatctttataaggcaattatcgatggctattatctaagcggaaaagattttggcgaaatgaatcaagtattgcaaaaagtagttgccaatccacaaactttgcagaaatacagcgaattatcgcgtaaggcaagtcaacagtattcagaagatcatttagctaaaatttgggacgaattttatcatgagcaatatgaattaggaaaagagctaggtcaaatacattaatgaataaaaaacatttgtggggcattctggttgttttagcaatcagtgcctttgtgctatatgcagatttaaaagctacaccgatatcggaaatattacgggcagctcatggcctgaatatttttggattaatcatggtttttgctttaatgcttttgtcctatgtatgtgaagccggtatcttagctactttagctcatcgaaagaaagagcctaaaaggtcagcttggtcgtttttgcgaattccaattattcaagctctatttaatgcaattacaccaatgtccacgggtggacaaccatcacagctagccgcaatgattcaaatgggcatggaaggtggccgttccacctcaattttgctgatgaaatttattatttatcagatcgttgttttgtttgcctatgtatttacaattatttttggctttcacatggtaatgactaagttcgctggtttagcaatttttattgcaattggctttttgattcatgttagttcaattatctttttgctggcaattatgtttgcttatcgttttactaaaaaggcaactaattggttaatggacttgttggcaaaaatgatgaaaaaggaacgagttgagaagtggcgtaaggctactttagaaaagattgatactttttatgcagagagtcagaaactaaaaaaagaaaagaagaaattatttgttgcctcgcttttaacagtattgcagctacttttcttttactccgttccatttatggtattaacagcgctaaatgtaccttgttcttggtatcaagttacgcaaatgaatataatgattatcatgtttatggcgatcattcctattccaggtgcgtcaggaggggcagaatatagtttccaaacgttattctccaccttcatttcttcacatggtgcgttaattttggctatgtttatttggcgcttttcaacatattttttcggtatgcttctcggcatcttaggctggatttttaagccgaaaaagataaaaagcacaaaaatgattaatttttattaaaacaacggtgtcttactaaatttcgtagtaagataaattaccgtaatgagaggagcagaagcgcgtggaacacactaaatctttttttaggtggctgacacagactaagttaggcttttttacgattgttttagtcttgttttggcttaaaacttattttatctatttaactaagtttaatttaggagcagttggtccaatgcagcaatttttattgctgattaatccgattccttcagggatgcttttgctgggaattgggctattttttaaaggacgtaaatcctattggattattttagttatcgattttttgctaacactgtggttatttgccaatattttatattatcgcgaattttcaaactttttgtcattttcaattattaagacatcaggctcgacttccgataatttgggtaaaagtattgcaggaattacactagctagcgattttttagcttttgctgatattgctgtaattatcgtgttattggcgaccaaagtaattaagatggatgttcgtccactgaagctaaaagttaatttgttaattgaggctttggctgtcagcttaatgggactgaatttattgatggcccaaaatgatcgttctggacttttgacgagaacttttgataataattacatcgtcaaatatctgggaatcaatgaatacgctatttatgatggctataagacagcacaaactagtgcacagatggccaaagctaatgtttctgatttgaagtctgttagaaactatttaaaagaaaattacgttaaacctaatcccgcttacaccggcgtggctaaaggaaaaaatgtgttaatcatccatttggaaagttttcaacaatttctgattggctacaaatggaaaggtaaagaggtaacgccaaatctgaataagatttatcatcaaaaagagaccattagttttgataatttctttaatcaagtaggacaaggcaagacttctgatgccgaaatgatgcttgaaaattctttatacggactacaatcaggtagtgcaatgtctacgtatggtacttctaatacttttgaaagtgctccagccattttgcatcaacaagctggttatactactgctgtaatgcatggtggtgctggctccttctggaatagaaataatgcttataagtcatttggctaccaatactttatgccactgtctttctatcagaacaaaccaagctactatatcggatatggcttaaaagataaaattttctttgatcagtcaatcaagtacattgagcgtttaccacaaccattttatttaaagatgattactgtaacgaaccactatccgtataatatcgataaaaagaatcagacgattgataaaacgaatactggggatgaaacagttgatggttatgtgcagaccgcgcattatttagaccaagcaattggtgaatttatgcgttggatgaagaagacgggcctagataagaagacactagtagtattttatggtgatcactatgggatttcaggtaatcaccataaggctagtgcagaattgcttaagaaagattcgtttaatgactttgataatttgcagttccagcgagttcctttgatgttccatatgaaaggactaaagggtggcattaatcacacctacggcggtgaaatcgatgttttaccaaccttactgaacttgctggggatcaaagacaaagatacgatccaatttggctatgacttgctaagcaaaaatgcaccgcaaattgtagcacaaagaaatggtgactttatcactccggaatattctaaggtgggtagcgattattatgacaccaagacgggcgaaaggatcaaacctaataagaaattaaaagaaaaattaactgcaatttctaacaccgtaactacacagctgtctttgtcagatcgtgtaattaatggcaatctgctccgattctataaaccaaaagggtttactagagtcaagccgaaggattacgactataacaaggcgccatctttaaaacgtttgtttgatgatccaagcaaaacttcactgtggtatcaaaatcatcgtaaaacgacgcaaaaagatttcaagacagatgcgcctgaactaaaaaaataactgcaaaaactagtaatttgtgataaacttggtaagtaaatcgtatgtgtgtattggaggcagcgcattgtataatttagttatgacgctactaatcattgtttcaatcttaattgtcattgcaacaatgatgcagccacaaaaacaacaagatgcattgaacgccttatctggcggtgccgtttttagtgggcaaaccaaaaaacgtggttttgaagcatttatggaaaaagtaacctcagttttattggtactctttttcgtctttgctattatcttagcttatatgtcttcaaaataaattttgtacctcccgatcaaaatatgatggggaggctttttttattaaatttaaagatcggagaataactgcatggcacaaaacgaaaaaattttggccggcgttttagaaatttttcgccataatccacaaaaacaatttcgtgtagatcaaattgaacgtgaagcacgtcgtgatagattaggtaattttactgaattaattaaggctctttcttttttagagcacgataaaaagattattacagatggcaaaggacaataccaattagctcaagaaaatactgaagttgaaggtgaatttagagctaatgataaaggctttggctttgttagattagatgatgaaaatgcggacgacgtctttgttgccgcagattataccaagtatgccgttaatggtgaccgagtaaaagtaaagatcactgctggtggtaatccttggaatggtaagggaccagaaggtcaagttgaagagatccttgaacatggtttggaaacgttagttggtgaatttcatccgctaactgatgaacaaagaaaaaacagtcattttatcggctatgctttgagtaacgataaaaagttgcataaataccgggtttatttgtctgaaaatggcttgatccctcaaatgggcgatatggttaaggtctcaattaaggattatccagatgaggaaaatcctgagtcaatgactggtgcagtagtcaacattattggtaataaaaatgaccctggcgttgacattatgtcaattgtggcagcacatgatgtaagaactgaatggcctgaagatgcaatggcgcaagctaatgctattcctgatcatgttactgaagaggaaaaaaagggtagagtagatattactgaccaacctgcagtcactatcgatggggatgattctaaggactttgacgatgctgtagttttatggaaaaagcctaacggcaattatcaccttggtgttcacattgcggacgtttctcactatgtgacagaaaatacgccgttgaacgaagaggcatttgctcgtggcaacagtacttacttagttgatcgggtaattccaatgctgccatttagactttctaatggaatttgttccttaaatgaaggcgtggaccggcttgttttgtcatgtgacatggaaattacgccagaaggtaaaagagtaggttataaaatttatccttctgttatgcgctcacatggtcgaatgacctacaacaaggttaacaaaactcttaagggcgaaatgaatggtttagaggataagtatgttaaactccgaccaatgcttgaagaaatggcagatttgcatgctgctttgtataaacaacgtcatcaacgtggtgctattgactttgaagaaccagaagcaaaaattattgttgatgatcaaggcaagccaacagatattgttttgcatgaacgtggtactgccgaaaagatgatcgaatcatttatgttaatggctaatgaaaccgtggccgaagatttcttcaaaaagcatgttccattcttgtaccgtgttcacgaaacaccagatgccgaaagaatcaagactttctttgaattttgtagcgcatttggcttgaatattcatgcggatccaaataacgttaagccaattgatttacaaaaagtagtttctaaaactacagatactccagaggaagctgtagtacaaatgatgatgctacgtagcttaaagcaagcgcattattcagaagaagcactgggacactttggcttagctgcagaatactatactcactttacttcaccaattagacgttattctgacttgatggtgcaccggatgatccatgcatatcaagaccaggggactaatgaagaagtgcaaaagcattttgctagttacttgccagatgttgcagaacaaacttcaacgcaagaaagacgttcaattgatactgaacgtgaagtaaatgacttgaagatgacagaatatatggccgatcaagtggggcaacactttgacgcggtagtatcttcggtaactagttttgggatgtttattcaattaccaaatacgattgagggattaatccatatttcgaatttgactgatgatttttacagttttaatgaaaaagcattgacgctaactggtcgaggtactcataagcaatataaggtagggatgccaattaaggtaaccttgattaatgctaacgttgaacaacatcagttagactttgaaatatatgatcctaatgcgcctaagcataagcataacgatcgcggaatgaataatcgtcgtcgtggaaaccgtggcttccgcaataatcatggacgccgtggtggtcagtttaataatcacagcgatcatggccgtggccgaggtaatggaaaccgtggaggtcggagaaattttaaacattagggattgatcttaatgaaaaaagaaaaagaagataatttaattgcacaaaataaaaaagcacgacacgactattttattaaggaaacattggaagcaggaattgctttaactggaaccgaaattaagtctgtacgagctagaagaatcaacttgcgggatggttatgtgcagatcgtcaacggacaagcctggctagaaaatgttcatattagtgaatataagcaaggcaatcggtacaatcatgagccactacgtagtcggcgccttcttttgcataaaaaagaaattgcacgtttggccaaagcacaatcagagcgtggtattgcaattattccacttaaagtgtatttaaaacatggctttgccaaggtattgattggtgttggccaaggtaaaaaggaatatgacaaacggcaaacaattaaagaaagagaccagaagcgcgatattcgacgcaagtatggtgtctaagatgagtctgagaagaatctcagactttttttgttgaaaaattttaaaaagttttttttattttcacaaagtaatgttcgaacaatttgaagaatgcagagaaaatcaagctaaatatttttttaattattatagaggcgaataatagtattaagatacgtttgatattgaaatattcatattaaaaatccgaacgaagagcaagacttgccaaagcgaagaaaataaggtaaattaataaagtcgcttcgagagatgcgacgagagcttaaaaacagacatgcaaggaaagaaaacaaataaaaagaaaaaagtacttgcaaagaagtaaataagctggtaatatatttaaatgtcgtcaggtgaaagcagaaaaagcttgagcaagacgaaaaaacaaatcaaaaaagttcttgacaaagaaatgatggtttgataaaatataaaagctgtctgctttgcaaaaaagcaagacagaggtagtactttgaaaaccgaacaaagtttcgctaaaagtgtgtgggtgtaaaaacccaaacaagaagcgaagtcaattcgcaagcaataaatttgagacaaagatcttaaataaggaatgagcaatcattcaaactttttaaaatgagagtttgatcctggctcaggacgaacgctggcggcgtgcctaatacatgcaagtcgagcgagcggaactaacagatttacttcggtaatgacgttaggaaagcgagcggcggatgggtgagtaacacgtggggaacctgccccatagtctgggataccacttggaaacaggtgctaataccggataagaaagcagatcgcatgatcagcttttaaaaggcggcgtaagctgtcgctatgggatggccccgcggtgcattagctagttggtaaggtaaaggcttaccaaggcgatgatgcatagccgagttgagagactgatcggccacattgggactgagacacggcccaaactcctacgggaggcagcagtagggaatcttccacaatggacgcaagtctgatggagcaacgccgcgtgagtgaagaaggttttcggatcgtaaagctctgttgttggtgaagaaggatagaggtagtaactggcctttatttgacggtaatcaaccagaaagtcacggctaactacgtgccagcagccgcggtaatacgtaggtggcaagcgttgtccggatttattgggcgtaaagcgagcgcaggctgaagaataagtctgatgtgaaagccctcggcttaaccgaggaactgcatcggaaactgtttttcttgagtgcagaagaggagagtggaactccatgtgtagcggtggaatgcgtagatatatggaagaacaccagtggcgaaggcggctctctggtctgcaactgacgctgaggctcgaaagcatgggtagcgaacaggattagataccctggtagtccatgccgtaaacgatgagtgctaagtgttgggaggtttccgcctctcagtgctgcagctaacgcattaagcactccgcctggggagtacgaccgcaaggttgaaactcaaaggaattgacgggggcccgcacaagcggtggagcatgtggtttaattcgaagcaacgcgaagaaccttaccaggtcttgacatctagtgccatttgtagagatacaaagttcccttcggggacgctaagacaggtggtgcatggctgtcgtcagctcgtgtcgtgagatgttgggttaagtcccgcaacgagcgcaacccttgttattagttgccagcattaagttgggcactctaatgagactgccggtgacaaaccggaggaaggtggggatgacgtcaagtcatcatgccccttatgacctgggctacacacgtgctacaatgggcagtacaacgagaagcgagcctgcgaagacaagcgaatctctgaaagctgttctcagttcggactgcagtctgcaactcgactgcacgaagctggaatcgctagtaatcgcggatcagcacgccgcggtgaatacgttcccgggccttgtacacaccgcccgtcacaccatgggagtctgcaatgcccaaagccggtggcctaaccttcgggaaggagccgtctaaggcagggcagatgactggggtgaagtcgtaacaaggtagccgtaggagaacctgcggctggatcacctcctttctaaggaagcgaaggatatggagagcaggaatgctaagagaagtatccagagcaagcggaagcacactgagaaactttgtttagttttgagggtagtacctcaaagatttgaaaaacgccaagcgttagtcgggcctatagctcagctggtttagagcgcacgcctgataagcgtgaggtcgatggttcaagtccatttaggcccattgacataacgaagaaaaagagttaaagttatgtctggccgaaaataaaatactctgggggcttagctcagttgggagagcacctgctttgcacgcaggaggtcatcggttcgaacccgttagcctccattgatccagagaaaggatcaaagagctagtacattgaaaactgaatataatccaagcaaaaaaccgagacaatcaaagagaacagattgtagagcgaccgagaagagaattcttgagtaaggtcaagtagaaaagggcgcacggtgaatgcctaggcactaacagccgaagaaggacgtgacgaactacgaaaagcttcggggagcggtaagtacgcagtgatccggagatatccgaatgggggaacccaatgcagagatgcaatattgattagtgaatagatagctaatcaaaggaagacgcagtgaactgaaacatctaagtagctgcaggaagagaaagaaagatcgatttccttagtagcggcgagcgaagaggaaagagcccaaaccaagtgatttatcatttggggttgtaggactgcgacgtggcagtgtaagagatagttgaattatctgggaaggtaagccagagagggtgagagccccgtaagcgaaatctcaagcacgcctagcagaatcctgagtaggccgggacacgaggaatcccggttgaaaccgcgaggaccatctcgcaaggctaaatactagttagtgaccgatagtgaaccagtaccgtgagggaaaggtgaaaagaaccccggaaggggagtgaaaaagaacctgaaaccgtgtgtctacaagtagtcaaagcacattaaagtgcaatggcgtgccttttgtagaatgaaccggcgagttacgttatctagcgaggttaagtcagaaaagacggagccggagcgaaagcgagtcttaatagggcgaaaagttaggtgacgtagacccgaaaccaagtgacctacccatgaccaggctgaaggtgtggtaaaacgcactggagggccgaacccacgtaagttaaaaattgcggggatgagttgtgggtagcggtgaaattccaaacgaacttggagatagctggttctctccgaaatagctttagggctagcctcgtggagaggataatggaggtagagctctgtttggactaggggcccgtcaggggttactgaatccagataaactacgaattccagatatccatacacgggagtcagactgcgagtgataagatccgtagtcgaaagggaaacagcccagatcaccagttaaggtcccgaaatctatgctaagtggaaaaggatgtggagttgcgtagacaactaggacgttggctcagaagcagccatcattcaaagagtgcgtaatagctcactagtcgagtggcgctgcgccgaaaatttaccggggctaagcatagtaccgaaactgtggatgtgttttaaagagcacgtggtaggagagcgttctaagagcggagaagttgaatcgagaggatcaatggagcgcttagaagtgagaatgccggtatgagtagcgaaagataggtgagaatcctatccgccgaaagactaaggtttcctggggcaggctcgtccgcccagggtaagtcgggacctaaggcaaggccgagaggcgtagtcgatggataacaggtagagattcctgtactgtgtcaaatcgttaagagcgaaggagggacgcaggaggtgaagcacgcatcgcgatggaacgatgttcaagcaacaagtgcggttaagagtcaaatgcttctaaccagcaacacgagttgtgaagaggagtgaattaaaagtagcgaaggtgtggtaatcacactgccaagaaaagcttctagccagagatgacatacccgtaccgcaaaccgacacaggtagtcgagtggagaacactaaggtgagcgagagaactctcgttaaggaactcggcaaaatgaccccgtaacttcggaagaaggggtgctagccaagagattggttagccgcagtgaataggcccaaacaactgtttatcaaaaacacaggtctctgcaaaatcgtaagatgacgtatagaggctgacacctgcccggtgctggaaggttaagaggagagcttagcgtaagcgaaggtttgaattgaagccccagtaaacggcggccgtaactataacggtcctaaggtagcgaaattccttgtcgggtaagttccgacctgcacgaaaggtgtaatgatttgggcactgtctcaacgagagactcggtgaaattataatacccgtgaagatgcgggttacccgcgacaggacggaaagaccccatggagcttcactgtagcttgatattgagtatcttttaaacatgtacaggataggtaggagccagagaagataggacgctagtcttattggaggcaatgttgggatactacccttgtttgaaggatgctctaacctcgacctgtaagccaggccagggacagtgtcaggtgggcagtttgactggggcggtcgcctcctaaagtgtaacggaggcgctcaaaggttccctcagaatggttggaaatcattcgcagagtgtaaaggtataagggagcttgactgcgagagagacaactcgagcaggtaggaaactaggacttagtgatctggtggtaccgtatggaagggccatcactcaacggataaaagctaccctggggataacaggcttatctcccccaagagttcacatcgacggggaggtttggcacctcgatgtcggctcgtcgcatcctggggctgaagtcggtcccaagggttgggctgttcgcccattaaagcggcacgcgagctgggttcagaacgtcgtgagacagttcggtccctatccgtcgtgggcgtaggaaatttgagaggagctgtccttagtacgagaggaccgggatggacgcaccgctggtgtaccagttgttccgccaggagcatcgctgggtagctatgtgcggaaaggataagcgctgaaagcatctaagtgcgaagcccccctcaagatgagatttcctttgcgtaagcagtaagacacctcagagacgatgaggtagataggctgggagtggaagtcctgtgaaggatggagcggaccagtactaatcagtcgaggacttgaccaaagcgaagcaaactggaaggttttttgcgagaaggattatgtttagttttgagtgtaaaagctcaaaagagtacggtggcgaaagcaagaaggatacacctgttcccatgccgaacacagaagttaagcttcttaacgccgaaagtagttggtgggcaactgcctgcgaggaaaggaagctgccgtgctcttttttaatattccggcttagctcagttggtagagcgcttgactgttaatcaagatgtcgtcagttcgagtctgacagccggagtactttgtatggaatgttgtccgagcggcttaaggagcatgattggaaatcatgtatacgggtttatacctgtatcgagggttcaaatccctcacattccgtaaatatatatgaattggaactatgttaacatagttcctttttttctacctaatttttcatatataatggagaaagggaggaaatatcgtgaagctacgaaaactaattccatttctatttttaatatctctattagctataacattttccgcttgttcgacaaagggagaagagaatacgaaactgtcaaattttttgtgtaaatagatctttctcgtagattgattttttaattatttatttaatcaaagtaggattctaaggtgtcctgaacctgaccaaagcctttgtggattcgattgaaatagcgttcgttgtagctcattgcttgaatgccaataaaagtatcaagcgactgttcagttggaaactctgccttaggcttagctttgcgcttgatcacattgttaaatgattcaatcatgttagtcgaataaattgaagctctgatctgcttgggatagttataaaagaccagcagatctggttctatgtctttcaagcttctgataacatggctgtaaaccttgccccatttggtatagaagtcatgcaggacagctgtggcttcttctttgtttgtctgttgatgcacctgtttgaattcgttcatgatcttttcacgatcgtcgacgcgtactttagcgcagatattgcgcatgacatgaaccaaacagcgttgaaaatgagctttaggataagtcctggccaaggctgttttcatgccaacaacaccatcagaaagaaaaagctcaacttgctttaagcctcgggatttcatgttttgaagcatatctgtccagacttcaatgttctcgctaggtgcaatgcagtagtcaatgacctccttgtgcccattaggcttgatgccaatggcaatatagactgcttcacgctcaaatgtttctcggcgcaaaggaaggtatgtcgcatccaaatagacgcagaaaaacttgtcgcttagcttgcgtttgtggtaagcctcaacctttggaatcatctgcttggaaatatttgatacctgagctggactgtaatggctgccatacattttttcaattagatcggctatttccctggtggtcacgcccttggaataaagcttgataatcatgctttccaagatatccgagtgctgcttgtagccaggcagcgtgtgctgatgaaattgactgttgcgatcccgaggcacttgcacttcaattgggccaaattgcgtatcaactttgcggaaataagcaccatttctagagttgccagtattccagccatttctggcataggggatcatagcccagaaaggcagtcaattcagcttctagcaagttattaacagcctgttgtagctctttgcgcaataaatcatttattttgtctggattgaatagagcttgagcaaaatctttggtaaaatcattcatgaaggagttcttctttctgtatgtgttttttgttcaaaccaatcatacgagaaaggaactcctttttctaatgtttaaagaaataaatttaaggaatcattcatccttacacaaactattttacggtctcgagaatactgctaagcatagagttaatattgtaacttctactaatatttatgcagatattgctaaaaatatagttggtaaacatggtcatgtacaagctattataaaaaacggcgatacagatccacatgattttgagcctacgactggctctgccaaagaagtagctaatgctaatattgttattgccaacggtctaggatatgatgactggatgactaatttagccaatgctaatgatattcatgtggttaaagttggtaatcaattgatgggattaaaacagggggataatcctcatatttggtataacttaaacatgcctaaaaagtatgttgattatctagttaaaacagcaagtaaaattgatccaaaacatgcagcatattttaagtctaatgctgcaagctatttgcaaaagattgatagtataaagaaaattgctgctaaaattaatgggcgtgaagataaaccggtttatgttagtgagcccgtgtttgattatgcactagaacggtgtcattttaagattggcaatcaggcatttgaagaagctgtagaaaatgaaacggatccgagtgcgcaagttattcatgagatgcaagtcaaaattaaagctagaaaaattgctttctttgttaataatattcaagcatcaagtagtacagttagtggcatggttaaactagcagagcaacataatattccagttctcgatgtaagagaaacaatgcctaatggaattagttattattactggatgaaagcgaattatcaaaaattatttgaaatttttttaaaataactattgcataattagggactatcaggtaatataataaacgttgtgattgagagatcacggtggtaataactaataaaaataaataaaaaaagttcttgacttttaaaacatgattagttattataataaagtgctcttgattaagagatatgacccgttggtcaagtggttaagacacggccctttcacggccgtaacatgggttcaaatcccgtacgggtcactaatggaggattagctcagctgggagagcatctgccttacaagcaggaggtcacaggttcgagccctgtatcctccattgttcgggactaccgccgcctcggtagtctttttttatgcaaaaagaacgaacaagcaaaattattattttatcggttcaagtcctgagaggattcactatgattagtgaagatgccttgtaaccgaatagccaatgtctatatagggggactaatatggaaagacgtttgtttacttcagaatcagtttctgaaggacatccggataaagttgctgatcagatttctgatgcaattttagatgcgatgttaaagaaggatcctaattcacacgtagcttgtgaaacgatcgtaactactgggatggtttttgtctttggtgaaatttctaccaacgcttatgttgatattcaagatgtagtgaggaagactattttgaagatcggctatgatcgtccagaattaggttttgatggcaataactgtgctgtgatggttgacatcgatgagcaatcacctgatattgctggtggggttgatcactcacttgaaactagagaaaacaagtctgataacgatgaattggatcaaattggtgctggtgaccaaggtttgatgtttggctttgcgattaaagagacacctgaactcatgccattaccaatttcgtttgctcatcgtttaatgagacgtgttgctgctttgagaaaagaccatactttagattggcttcgtccggatgctaaggctcaagttactgtagaatatgatgaaaataataagccattaagagtggatactattgttatctctactcaaactgatgcagaagtttctaatgaagaaatccatcgggcaatgattgatttagtcattaaggaagttattccggccaagtacctagatgaaaagactaagtttttgattaatccgtcagggcgttttgttattggaggtccaaagggcgattctggtttaactggtcgtaagattatcgttgatacttacggtggttacgctcgtcacggtggtggtgccttctcaggtaaggatcctacaaaggtggaccgttcagctagttatgcagctcgttatgtcgctaaaaatattgtggctgccggccttgcatatcgttgtgaagttcaacttgcttacgccatcggtgtggctcacccagtatcaatcatgatcgatactgccggcacaggtaaggttgacgatgaacttttaactgaagcagttcgcaacgtatttgatcttcgtccagccggcattattaagatgcttaacttgcgtcgtcctatctacgaacaaactgctgcatatggtcactttggcagaacagatgtcgatttaccatgggaaaagaccgataagactcaagatttgcttgattatattaaagatcatcaataaaaatattcgaggagtaaataataaatgaaaaaaacaaacgtgcctgtagtcacgcttgcgatttttatgacaacgtttatgaccgctattgaaggaacgatcgtttctactgcaatgcctacaatagtttcagaccttgatgggctagaaattatgaactgggttgtatcgatctttctgctgatgacggctgtttcgactcctttatacggaaaattggcggatagcattgggcggaagccagtttttttgtttggaattgcactttttgtcattggatcgtctttgtgtggcttagcgcaaaacatggttgaactgatattatttagagtaattcagggactaggttcaggagcggctcagccagttgcgatcaccattatcgctgacctttatactttgcaaaaacgcgctaaaatgttgggtcttagctctggtttctggggagtggcctcagttattgctccacttttaggtggttttattgtgcaacacctgtcttggcactgggtcttttatatcaatgtaccaataggaatcattgcgtttttattagtactagtgtatttgagagagcctaagcatagatctagttcaaaattggatttgcagggaacaatttggttagtattattgctttttgccttaatgttcttcttgcaggatcttggcagtagcatgaatttgctagttatggccactctagccgttttgattgtaatctctgtaattctattctttagagcagaaaaacgcgcagcggatccaataatgccgctctcgatgctgaaagacaaggaattctttgcattaaacattattacgctacttatttttggtgtagttattggatttgaattttatattccaacttggatgcaaggaattaatggtactaatgcctcacttgcaggatttgctgtaacgcctagttcattaatgtggattgtaggttcgttcttaattggcgggatgctaggccgctgggggattaaaaagacatatgattatatgttattggttttagttgtggccgatttggttttgattttagtgccgatttacacatcattctgggtcttctgtgttattgctgcctttaatgggaccgcctttggtgcgattacgacagcttcacaggtgagatcgcaggttttggtacctaaggatgacataggtgttgccacttcgtttaatacgctgatgaagtatctgggacagacaatgatggtttctatctacgggattgcttttaatacgatgttggcgcatgggttaagcaagagaccggggttgaatcaagaaatgatgaataaaattgtttctgcagaaaatgccaaaagtctggctgccaatgtagtgccacaattacggcaagttttgttaggcgggttaaaagctgtttacgttgtttctatgattgttattgtagtctcgattgtattgaatcaattgtatcgagatcgaaaattgaagaaaaattaagttgaaggagccacatgcaaagtagagcatgtggcttttttgtagaacttgtgattttataatttttaaaagaaaatatgaatttttaatttatataaaatacaaaatcaatattttgtaattaatattgaatttttatttcaaagagaatattatagttatgtaagggcttgcataaaaagccgtgaggtaaacaaatcaactattttctataaggagggtaagacgatggctgataaatattcagaattaggacgcgagatttatgcaaatatcggtggacctaataatgttaagtcaatgtatcattgcatgacacgcctaagaattaagatccgggataactctaaagtagatattcaaggcttgaaagatattgacggagttttaggcgtagtaaatgcggacacgttggaaattgtcctaggttctggggttaatgctaaagttgcacaagatatggttagccaagtgggagtgaaagaaaacgaagaattcccaaccagcacttaccagagcgaaaagtctgaagttcaagcaaaagctgcagaagtacatgctcaacataaggcacagttgaaacaaacatggtggcgtaaagctttaggccgtatttccgctatcttcattccacttattcctgcatttattggtgctggtttaatttcaggtgttgctggtatccttcgaaatatgttgacggctaagatgttgcctggtagctggaacttaggcgttactattctcagtatgattgctagtgcattgtttgcatatttgaacatttatgtaggtattaatactgctaaagaatttggagctactcctgctctaggtggtatcatcggcggtgttgttttgcttcctgggattgctgcaccggttactattccaaatgtattagatggtaagccgctagcagcaggccaaggtggtattattggtgttttacttgctgtatggcttttggcttatgtagaaaaatggttccataaacatattccagattccgtggatattatatttacgccgttctttactgtcctgattatgggactattcacagtatttgcaattatgccgattgctggttggatttctaattcattagtaggtggtattaattgggtgctcgatgttggtggtcctgttgctggattcatccttgggttgttcttcttaccaatggttatgctcggattacatcaaatccttacaccgatccatttatcaatgattcaaaaaatgggttatacaccattacttcctattctggcaatggctggtgctggtcaagttggtgctgcaattgccctttgggctaaatgtcgtaaaaacaaggatttagtaagattgattaaaggtgcgttacctgtaggtattttgggagttggtgaaccattaatttatggtgttactcttcctttaggtagaccatttattactgcctgtgttggtggtggtattggtggtgccgttgttgccgcatttggtcacgttggttcaattgctatcggtccttcaggtgttgctttaattccattaattgctaacaacatgtggtgggcatactgtattgggcttttatccgcatatgctggtggatttgttgcaacttatttctggggtgttcctaaagatgctattaaaggcaaagttgaaaatcctactcctgaagtttccgaaagaagagctgctgaaaagcatgctgataatttgaatatgcctagtgaaaaggctgaaatttcttttgaagctcctgtttcaggtgaattagaaaaaattgaagaagtaaaggatgacgttttttcacaaaagatgctagatgatggctttgctattgatccttcaaatggtacagtggttgcgccagtagacggtaaaattgatacagtaatgaatactaaacatgcaattacattgaaaactagtaaagggaacttagatgttttaatgcatttaggattagatacagttgaattaaagggtgctccatttgaaattgacgttaaaccaggtgatctagttaatgctggtgaaaaaataggtacaatggatatcgctgcaattaaaaaggcaggaaaagacccagtggttttaactattattgctaatatggatcatattgatcaggtatcaaaagtagaagattcaccagttaaggcaggtcaagttgtctttaaggcaatgacaaaataatttttagaaagaaaatgatataaatgtcacttgaaaatttgactactgagcaacgaaataaaaatactatgcatattgattctatgtctacattagatatggtaaagacaatcaatgaagaggataaaaaagttgcagaagcagtaggaactcaagatgaagaaattgctcaagcgattgatattggctccgcacgttaccaacaaggcggcagattgatctatattggtgcaggaactagtggaagattaggtgttttagatgcggcggagcttgtcccaacctatggaattaaaccagaacgtgcaataggtttaattgctggcggtaaaggtgcaatgtatgtggctgtcgaaggagcagaagatgatcctaaattagcagctgaagaccttaaaaagcttgatttatcagaaaaagatgtagtgataggcttagcagctagtggtaggactccttatgtgattggtgggcttgattatgctcaaaaagttggtgcggctactattgcgattgcttgtgttaaacatagtttgattggtcaacatgcaaatattgcaattgaagctgttactggtgcagaagtaattacaggttctactagaatgaaggctggcactgcacaaaagatgattttaaatatgatttcaacagggattatgattcgccaaggtaaggtatatcaaaatgtaatgattgatgttttgccaacgaatgaaaagttagttgaacgtgctgaaagaatcattcaaactactacaaatgtttccttagaaaaagcagcaaaaattttgagggatgctgataaagatgttggtttagcaattgtaatggccaaaacgggtttgaaaaaaaatgatgcacaattgttgctgaaagaacatcagaataatgtaagtagtgtcttgaaagaagaatagatataaattaaggataaggaagagtggcagtaagtaatttaatttcgctgattgaagaaagaagacacattatgaatagcaagaagttaattactggaagttgtactgtagcattatcagtgatgatgttggcaagtactgttacatatgctcctattagtaactcacaggtgtatgcgagtgtggtaaaacaaaagcaagaaccaacaggtcaatatcaaattaatgatagttttcctattgatgaaaagaatgataatcccaaatttgatacttggtcattactagataatattaatcgaaagttttatggcttcaaaggtcaaggatcagtttgggtacacagtaataatgccaaaaattttgaattatatattaatgggaaaaatgttagtttaaaaaacattagtagtaataaatgggtaaaaattgatatcagtaaatttacaaaaaatggaaataatgctttacagatttcaccaaagaaaggtgttagagcaagcgataaatttgatattaaattaccttatcctacattagttgataaaactaaagaatatcggaataatgatacatttaaaactatggatgcactaattaattctgagattaagaatggatttccgtctgcagagttggttgttgtacataatggacaaatcattaagagaagtgcgtatggtagagtaaatgcatactttcaaaatggtaaacgccgtgttaatgctccaaaagttaccaatacaaccatgtatgatttagcttctaatactaaaatgtgggcaacaaatatggctatccagaagttggtttctgaaaagaaattaaatattgatgcaaaagtaagtagtatttttcctgactttaaagataatgctaatgataaaattaaaggcaagactgatttaactgtgcgtgatattttgatgcatcaagcaggttttccagccgatccacaatatcacaacaataactataatccggacaagcctaatgaacgaaagaagaatgccaaccctgtatatactcaaaatagagacgaagtattgaagaagataattgctactccattgcaatatgcgcctggaacaaaaacaatttattcagatgtagattatatgcttctggggttaataattgaaaaagtaacaggtcaacgagaagataattatgttgaaaataatatttataagccattaggcttgcgtcatttgatgtataacccattagataaaggcgtatctaaaaataaaattgcagccacagaattaaatggtaatactcgggatggacagattgattttaataatatacgtcactatacattgcaaggacaagttcatgatgaaaaagcatactatacaatgcatggagtaagcggtcatgcaggattgtttggcgatgcttcagatttagcggttttagcacaaatggtcattaatcgtggcggttatggtaatcacagaatatttgatgaagatactcttgatgaatttataaaacctaaatctacaaactatagttatggattaggttggagaagagaagcaagtactacttacagcggtaattatggatgggccttttcaggattgtccgatgcttcaactattggtcatacgggttggacaggtactttgaccgtagttgatccacacgataatactgcagttatcttgttaacaaatgaaagaaacactcctattcttaaacctgaaactactgctactgcaaatgactttgctggtggtcactatttgctatctaaatatggtgatattgccagtcttgcgttcgctgcaattaataaggacaattcatctgctaataatgccaagttaattagtcttacaatgcagagatttaacgaaattcaaaagaataaagatgatcaaacaaatgcagataaagcagacttatgtggaatttatgatgctttaaaaatgcgtagtaaaaagcataattctgtagcaagatttttagcgactacaaaaggaaagcaaattactgcatacgttaaggcaaataagaatgccgttaataatgttcgcaatagtcattaattaagaataaaagccattcaatatgaatgacttttattttattagggaggttagatgctaatgctaggaatatctgtatatttccaagattatgatgaaaactatttgaaaaaagcagctcaagctggtgcaaaatacgtttttacgtcacttcagattccagaagaagattattcagatctggatcaaaaattacctggattctttgaactgtgtaatgaattggggcttgaagtaattcccgatgtttctccagcaactttggaaaagctaggaattaaagaaggcgattttgaagctttaaaagataagggattcaaggctttaagattagattatggttttgataactttgatttaatcaaaaagctacaaaaaaaattctttattttattaaatgcaagtgttgtgtcactggattatttagatcgtgctagaaatgcaggagttgattttaataaattagctctaacgtacaatttctatccacatactgatacgggtatgggatggtcagattttaaacgtaaaaattggatgttgaaggattatggcttaaggactcaagcttttgttcctggggatgcacttaaacgtttcccactatatgaaggcttaccaactgtagaaaagcatcgtggagtttcaccttacgttgcagctgttgaattaattcatgaggcgaatgtagatgatgtgtttattggtgatagccaggcttcaatcaaaaatctccaatatattgtagattaccaaaaagagaagactttaaacttagaatgctctttattgccacagtatcaacaactgtatgatcaagtgatcgaagtaagaaaagatatgccagaaaagttgattcgattaagtttatctagaaagcctgatattccagtttgcaatactttaaataggcataggggtactattacaatgcaaaacaaattagctcaaagatatagtggtgaagttagtctgattaagtcaaatttacattttgaagcacgtagtaatgtaattggctttatttcacctgagtatgtgaagttgcttgattttattgattcgaatacaaaaattatttttagaaggctgacatagaagaaaggtgatattatgcttaatttggcgaataagatttcagatgtatatcctaatttgaataagacttctaagttaattgcagacgtttattttaaagaaccaagaatttttctaaataaaaatttacaggaattaggtaccattacccaaacgagtggtgcatcagtcgttcgcttttgcagaaatttgggctttaaaggttttaaggattttcaaatagcttgtgcgcaagaaatgcctaataaacaagatgctatggtagatacgattatcaatacaaatgatgaaccaacaagcgtgctttataaattgcaacttagcttaggaaaaaatattgcagacattggtaaaacaatagatcataaatctttagatgctgcagtagatttaatgcgatcagcacaacagatatatgttgcaggagaaggagcatctggtcttgctgctcaagatttgttttataaattaattcgtagcggaaagaatgttaatttcgttcaaagttcacatattgctttagaacaagtagcaaatattaataaagaagatatactaatcgttttttcctacagtggattaactcaagaaccattgctaatggcaaagcaggcgcaaaaaaataatgccaagatagttgcagtgactcgtatacaagattcaccactaaagaatatggctgatacagtaattacattgccatcaaatgagaagttattgcgctatggtgctattaattcactatttgcagaaatctttgcttctagcttgctatatttgagtcttatttcgccaaatttagaagaactaaatatgaaaatgaaaactacgcaaaatttgactaatcaattaaaagtgtagaatctataaaataacaactaaataaatttaaaaaaatcaaaaatattttcatgatgaaaataataaaaataaagaaaaaaaggaccagtttggtccttttttagtactttttttgcggttggaataaatctatatttgacaatgctataattataaatggaaagtggcctaaaaataagataacactattgaaagcgcattatttgcctccttgaaagtaaatctaagtagctgtacacttaaattgagctgaataacgaacgttatttttggcagagacttgtaatgcgagtaggaattatgggggcgtaaaaatggatattactagtttagcaagattccaatttgctatgacgacgatctttcactttttcttcgtgccattttcaattggtacgatattcgttgtcgcaattatggaatcaatgtatgttcatacaggcaagcctgaatataaaaagatgaccaagttttgggcaatgtcattaagttaagacattgacaaattgaatctaatctctgtagaaccgaatcattatgatttggttctttttttgcataaaataaaggcgaaaagaacctaccttttcgccctctgattaaattattaaaccttcaaaattattgccagaaagctggtgttaattatgaaagcccttcacagaaatattttagatcgtcttgatcaaattatcaatgatactggaaagcatattcatgattttatcgatgatcctcatgccttcactaggaagcggtttttagatgcagctacagtcattaaaactactattaatatgcaaggaaaagatttgaccagtgagttgtttagagcttttggccaaaaagctattaaaaataacgataaagtagtcagtacttccgcttatgtccaacgcaaaggtcagctttcacccgcatgttttaagcatattctaactgtatttaatcagaatttatttaatatccagttatttgatcataaatatcgtatatttgccattgatgggtctgattttaatcaaatctggaatcctaaatcagagaatatcgttggaaatctcaatcataaaggaaagccatattgccaaattcatgttaatgcactctatgacctgttaaataatacttatcaagactgcatctttcagcctaagtcaaagatggatgaacgtaaagccgccgttcaaatgcttaaaaagctaaattgcggaccatatatagttactatggatcgaggttataccggctttaacatgattgaaaattgtaatcgcctgcctaactgttattatgtcatacgtactaaaacgggatatggcgcatttaaggaagtagctgagttgcctaatcaagagtgtgataaggatatagcttgctgggtgactacctctaattattattatgaaacccataaggctacagaaaacgttcatttggttaaccatcattaccgtcaatatataaaatatcggtctaaaaataccaaagatggcagctgggactttggagagttatgtacaataaaatttcgtgcctgtaaatttagaattaatgatcctaaatcaggcaaagaagaatgggaagttgttctaactaatctaaatagagccgattatcccttaaaaaggatcaaagagatctaccatttgcgctggggcattgaaacttcattcaaaaagttgaaatatgctttaggtagcgtacagtttcattccaagcaggatagatttattgaaatggagatctatgcccacatgattatgtttaacgcagtcagtcaaattgatgctcaagcatatgtaccacaaaaaaactgcaagtatcaatatgcgatcaatttcaaacagtcatgttttgtcatccaggctatgtatataatttcttcttcaactgaaatctttaaaaagattcttattcaaattagtcattacacaattccgatcagaccaggacgaaaagacaaaagaaatctcaaacccaaatcagctgtatattatttatatcgtgtagcctaatttctaaacaaaatttgggtttatttggcatgaaaaaagatcattcaaatgcgataaatcacaaatgaatgatcttaaaagtccaagtcgataatttgtcaatgtcttaacttaatgacattgaagttttgggctaatatctttttattgagttttgccgttggtgttgtaaccggtatcattcaagaattccaatttggtatgaattggtccgattattctagattcatgggggacatctttggtgctccacttgcttttgaagcattgttgtcattctttattgaatctacctttattggtttgtggatgtttacttgggataaagtggggaagaaattacacttattctttggatggatgatcgtctttgggacaatgacttctgcattatggattttaacagcaaactccttcatgcagcatcccgtcggctttgctttacgcaacggtcgtgccgaaatggctgactttggagcacttcttaagaatccacaattaatgtatgaatatggtcacgtaattgttggtgcacttttaactggtactacaattttgactgggttagctgctttccaactattgaagaaacgtaacctttcagacattaacaagaagatctatcgtaagacaatgcgtttaggcttaatcttaatgttaattttctcagctggtgaaattgctgtgggtgatatgcaaatgcaatatactttgcatgatcaaccaatgaagttcgccgcaactgaagctgtttataagacaactggagaaaaggctccatggacggtagttgcaattgctaatccaaagacccatgaagttaagggaattgatattccagacatgttaagtattctttcttaccacaagactactggttctgtaaaaggtatggaagaaattaacaaagaacttgaaaagaagtatggtacacatattgatggtcgcaagatggactactatgtaccagttaatactttattctggtccttcagagtaatgtgtggttttgctgcattattattcttgatggcaattgttggtttaatcatgactcgtaagaataaagaaaccctttataaccatcgttggctattatggatcttcgcacttcttacattctcaccattcttggctaacactgccggttggttaattaccgaacttggccgtgctccatggacagtttatggattatttactattgatcaaagtgtttcaccgaatgtttcagtggcttcacttttaacatcaaatattgtttacttctgcttatttactattttagcaattatcatgattgcattggttgttcgcttcatgcacaacgatccagatgaatatgataaggctcaagaggcaagcaaagtagttgatccgttctcaaaggggccatctaaaatgtcatttttacaaatactttggtttatcttaattggagtattgttctcaggcttcttcttccttgatggttttgactttggggtaggaatggccgtgaagactttagctcataatgaacctgaaagagatcaagttgttaggacaatcggaccagtttgggatggtaatgaagtttggttgattactgctggtggtgcaatgtttgcatcattcccatactggtatgcaaccttattctcaggttactatttaattttattattgatcttagttggcttaattattcgtggtgtgtcatttgaatttagagcaaaatgtgctccatatcaaaagcatatttgggataatgcaatggcgatcggtagcgtaatagccacctttctctttggggtaatgtttatctcaatgattaaagggatgccaatcgatgctaaaggtaatatttcagctagcttctttgactactttaactggttctcaatcgttggtggtattgctttaacacttctttgctatttacacggcttaaactatattactattaaaactaagggcgttatttcagatagagcacaaaactatgcacaagctttatactgggtactctacgtcggtgaagtggtctttgctttattattgattttccaaaccgacttcatgagagtacatccaattgcaactttaatatgtttagtattaattgtcggcttctctgtggcagcacatgtagctacctttatcaataagcaaggaatggctttagcttgcagtggattaactctgatctcattggttgcattaatcttctgtggcttattcccaagagtaatgatttcatcaatcagtagcaagtatgatttgcttattcatagtgcatcatcatctaactacactttgattgttatgactgttgctacttgcatcttggtaccatgtatcttggcttacaccatctgggcatattggatttttcgcaagcggatttcaatgccaagaatcggagaggttaaataatgattgataaacagctatttaaaattgatggcgctggttcaatcttaaaaaaacttgcagggcttgagattctgcaagctttttttatagtaggacaagccttggcactagcgtcagtcttaagcaaattgtgggcaggtgagtcactagactggctattgcttcttacttttgcggcatgctttattgctcgccagttaatcaatactttgcgtgactcaatgcttgaaaaatattctggtcaagttgcagaagagctgagacagaaacttttagataaagtctttcgtgatggtcaggctttagtccaaaaacaaggtactggtagtttgatcaccatgtcgttagatggtgtagatgaagtaagacaatatatcaaactgatctatagtaaagttttgacaatgatgattgtgccagttttaatctttgtcggcatgctttttttaagctggacatcagctgtgattctgatagtcatgtatcctttaattgtcttattcatgattatcctaggtcatgctgcacaggatcgagcaattaaacaatttggtaactttcaggttttatctaataactttattgattctttaaggggaattgatacgctgaagtatttaggcctgagtaaaagatattccaagtcaatttttaacttgagtgagggttttagaaaaaagacgatggcggtgctaaaagtagcaatgctttcaacttttgccttagactttttcactaccttgtctattgcaatcattgctgtttttcttggttttgacttgatgaatggtaaaattgcactttttcctgctttaggaattctgattctggcgccagattattttttgccaattcgagattttgcgggggatttccatgcaaccttgaatggtaaaaatgcctttaagcggatcaacgaattgattaatctgccagaggaaaaaactaatgatttatctttaaaaacttggtcagctcaagatcaattgaagatcaagaacttgaagtttacttatcaaaagggaaccgaaattggaccggtttcattacaagtccaaggattcaagaaaattggcattatcggaatgagcggatctggtaaaactagtttaattaacctgctcagcggctttttgactccggatcaagtgcaaattgaactacaagggcagaaaactacgaccatgaatattcctgcttggcagcgtcaaatgacctatattccgcaggagccatacgtttttactaagagcttgcgtgaaaatattgctttttataatccgcaggcaagtgatgatgaaattaagcaggcgattcatatcatgggtctggatgccttgttaaatgatttgcctaacggacttgatacggtgattggccgcggtaagcgtgtcttgtctggaggtcagtcacaaagaattgccttagcgagagcatttttggatcctaagcgaaaaattatgatcttcgatgagccgactgctcacttagatatcgaaacagaaattgacttaaagaagcggatgatgccattaatgcaaaataaactggtcttctttgcgactcacagactgcattggttaaaagaaatggactatattctagtgatggatcacggtcaattggttgagcaaggaagttatgagcaattgcagcaaaatcaaggctacttctgcaagttaatggcaggaatgagaggtgaaaacaatgatcaataagattccggttttaagagcattaaaaaatgatcgttgggttcgcccatatttggaaaaatatcgtaaaacgttgattttggcgattgcactgggcattttaactttcgtctgtggcgggggcttgatgttctgtgctggctatttaatcagccgttcagcagctaaacctgaaaatattttgttaatctatgtgccaattgtcttaactagagcatttgggattacgcggccagctgtccgttattttgagcggctggttagtcacaattgggtgctcaaaatgacctccaaatttagacaacagctttatgactcattggagcgcgatgcgactatttttaatagtaagtatcagctaggaaatattctgggacttttgtctgatgatgtcagccatattcaaaacttttacctaagaacgatctttccaatgtttgtatcttggggcttgtatgcaattatcgtaattggcttaggcatcatttccccactgatgggcatttggatgttgatcctgtttttcttgattatttttgctattcctatttggtcagtcttaatcaatggtgcgcggcaaagctatgaaaaaacggttcaagacaagctctacgttgatttgactgataatgtgatgggagtagatgactggattttgtctggccgcagcaaagaatacttggccttgcacgtcaatgatcaagagaaatttttgcaaatcaacgcgaagatgaaaaaatttgatcgctggcgcgactttgttttacaaatcttctgggtgttggtaattgtgagcctagtaatttggggtgctgccagatttggcgggcgttcaacttattatactaattggattgcggcatttgctttggcattattcccgactgttgaggcttttgcaagtttgccgactgctgctcaagagacgaatatctacaaagattcgcttaagcgtttgaataatttgccagctcctgatcggactaagcataaaccaatcaaattaaccgcaccgtttaatttagtattaactgatgtgcattatgcctaccctcaaactaataaagaggttttgcatgggatcaacttaaatatccatgatggtgaaaagattgctattttgggtcgtagtggtgcgggtaaaagtactttagctgccttgctcagaggtgatcgggtaccagctaaaggacacgtaactttaaatggaattgataccagcaagtttggcgatcaaatgtccaattactttagcatcatcaatcaaacgccatatttgttcaataccacgattgccaataatttgcggctaggtaatgaagatgccacagatgagcagctatgggacgttttgcgccgagtaggtttggccgagatggtgcaaaaattaacggatggccttgatactaaggtggatgaggcaggattacgcttttcaggtggtgaacgccatcgtttagccttagcgcgaatcttactgaagaatacgccaattgtcttacttgatgagccaacagttggcttggatccaattacggagcaagctgtaattaatatgtttattaaggaattatccggtaaaactttaatttggattacacaccacttgcaaggaattgatcagatggatcaagtaatttttattgaagatggacaaattaatatgcagggtacaccggaaaaattatggcagacagagccgcgttatcgtgaattgaaaaaggctgatttaggattatagaggttcattatgctaacgaataaagtgccagaacaagatgtgcatgacctatttactagggtcgcacctaagtatgatttgatgaataatattgttagtttagggattcaaaagagttggcgtaagaaatttttacggcagttagatttaaataaaaattctatttgcttagatttgtgttgtggtagcgctgattcaactattgatttgactaaaaaagctaaattagtgactggtctagattttaaccaggagatgttgaagattgcccaaaaaaagattcgtcaaaagcagctgcagtccaagataaagttgattgcaggggatgcaatgaatttaccttttgcggccaatagctttgattgtgtaactatttgttttggcctgcgtaatgtccctgacgctgttaagacgattcaggaaagctaccgcgtacttaagccgggcggacaatttgctgttttagaaatgtctcagcccactaatgcattagttaaattgggctggcaagcttattttaaaatttttccgtattttgctaagttgacacacggtaatatcaaggactaccagtatttgtcaaaaacaagtaaagaatttctctcggctgagcaattaaaaaagctacttgagcaaaatggttttactcgagtagcggttactaagttaacttacggtgcaggtgcgattcatttgggacgcaaagactaaagcgttcgattgactaatttacgcgtcatctttttgagcaagacggtcgcattagtttgcggcagttgggctaagttagctaatgcccgattagtgtattgttcagctaaggcatgagtttcttcaatgactgagctgtttagcaaaatcttttggatttgttcgatatcgtttttgctcatttgtcgctttttttcaagtagcggtactaattgctctcgtaattcctttttgctaagagctagcagaataggtagagagtagacgccggtagtcaaatcttctagcgttggcttgtttagctgcttgccgccagtgtaatcaagaatgtcgtcaacaatttgaaaagcaatgcctaagttttcaccaaaggaggctaaagcttgagtagtttgctcatctccattgccaaaatggcttccttcttcggcagctaaacgaaaaagtgcagctgtctttcctttaacattagttaagtagtcgttgaaatcttggcttaggttaaaacgttcagccatttggcctaattcaccagcaagtaaatggtgcattgtgtgagcatttttgatcatgtaatcttgttcggaaatggcgttcaaaattaggtcaaaaaagtgcgtaaaaagcaagtcgccagcgtaaactgcggtgtctttgccaaaacgggcttggatgctaattttaccgcggcgctcgtcagaatcgtcaatgatatcatcatgaattaatgaggccatatgcaaaatttcgattgatgaggcaagttgaataatttgttttgatacagtttcttttttgctagcaatttgagctgacaaaattagtaaactaggctgtaaatatttaccaccgttactagccatttcaaggagtgcatcttgcaagtctgaatatggagtgcggatggttgcctgaattaattgattaacttcttcaagcggtttacgaataagtggatatttttgccaaggttgagagttattcatgatagatttccttataatagagttaacagaatagtgatcctttgaaaggatgtggatcgatgtcattaagtgtatttttagaattaattgagattaaagcaaaaaccgctagtgtcattccctttttcttagggatgtgctacagcgtgtattattatcaccaggttaactggggatttgccctagtcttcttcattgcaatgctactatttaacatggtagtagatatgtttgataactactgtgattattatcacgcagatagcaagaattaccaagagaagactaacattatcgggcgagaaaatatttcacctaatttagttctgggattaattatttcctttagtcttattgcaattttattaggtttgtatctagtcgctaaagtaggcttgcctgtattgtggatgggcttgttctgttttatggttggttatttatattcatttggtccgcatcctatttctagcttgccactaggtgaattgttctctggtttcacaatgggcttcatgattgtcctgctcagtgtttatatcaatagttttcaagtctttgcttggaactgggccacaatcgggcgcattttcttattagccttagcagatgaattatggatttctaatttaatgctagctaataatttatgcgatgcccaagaggacgaagataatcatcgcaccacgattattcattttattggtaaaaaaggtggcttgattgcttttagtgtcaaaaatgttttagcatttttggtaatcttcctcctaccgttcttgggaattgctcctaagacggtttggttaacagtaataattgtaccgttcgtttataagcagaacaagatcttaattggcaagcaagttaagacagagacatttatcacaggagtaaaaacgttgctagttggttcactgacttacttaataacttactttttaggaattctattttagagaggttgaaaattatgaaaacagttgtagttttaggtgctggttttgccggcttgaaaacagttgtcgctttgcaaaagaagttgcgtgaacaagttaagattatcttagttgaccgtaatccataccactacgaaacaattcgcttatatgaagtggctactggtgaaattccctacactgggatgtcatatgaaattaatgatgtaattaatccgaagatgactactgtgattacggatgaagttgaaaaagttaatattgctgataaaacagttgagttaaaggatcatgctccacttaaatatgactattgtgttgttggcttaggctttaccttgagcaatatgggcattaaaggtgcaaccgaaaatgctttgccaatgagcaatgtaaaacaagctgaagctattcgcgaccacctttatgccgaaatgaaggcttatcgccaagaccatgattctaaacacctgtcagtagtaatttgtggggcaggttttcaagcaattgaattaggaaatgccattgccaaggttcgcccagaactagctcaaatggctggcgcccaaccagatgaaattaccatcagaatgattgatggttcgccacgtcttttgccaatgttccaaggtaaattgcttgattacgctttaaacacaattaagaaaaataaagtcgaaattattaagccagcttatgttaatgaagtaacctctacctcggttttgtataaaatggctaatgaaaaagacaatgctgagctgcaagaaattaaggcaggtactagaatctggatgatgggctttagtggcagtccagtaattgaggcatctggatttaagaaccgtcgtggtcgggtcatggttggtgatcatttaacagcgccagaaagtgatgatatctacgtcttaggcgatgtttcaagcgtcatggttcctggtaagaaatggccatatcctaacactggtcaattggctctttcaatggctaactacgctgcaaaagatattaagagcagaattatgggtcaaactagaccggataactatgcttaccatgacttaggtgtagtagttaacttgggtaattcagaagccgcaggattggcaatggggcatgcttttaaaggatactttgcagcaactcttaagaagattaccattgataagtcggttcttgaaactggtggtattaaagaaacaatggcgattggtcaatttgacttctatcactaaaattgaaaataaaagagaataaaaaatcacttcagtttgatttgatatgaaccccaaatttgggacatattattgaactgctttatttaaaaccatatttcgatattctatcggagtatggtttttttagtactgttttaattctttcatgattgtagtaattgaatgtattaggactaaagtgtgaagttgcgccattttatgccacaccaagaagacctgctattcaccacactatgggtggcttagtaatcgacactaaggctcatgttttaaataaggacggtcaaatcatcgctggtctttattcagcgggtgaaaatgctggtggtatccatgccggtaaccgtttaggaggaaattctttagcagatatctttacctttggtagaattgctgccaatactgcttatgaggataaacatgttaccgatgttattactggcgcttcgcagaaataaagatagagtataaaaaaatacagatatatcaatttaaatattggtatgtctgtatttctatttggagtcatttttccttaccttcgaataaaaacccatgatttctaattcttactaacaaaaataatagtaacttttttctaacttcccaaaaaaattttgcgacttttttgcgtaataaataatagaggataaatatcatcaaattatttaaggagaactttgcatgagcaaagagaaagaactaaatgtgtctgaagcattaggttttacggatgatttgatgtttcagattgttatgagagatccagagatctgtcgtatgttcttgaatgaggttctaccacatttggacattcaagatatcactgtccgcacgcaagaaaggattgcttttaaccaagaagataaagtttcgattcttgatgtcctgattacggatagcagaggcaggcgttacaatgtggaaatgcaggtcgcgcataaagcagacatggataaacgagccaggcaatacctgttcaagatgatggaagatggctttttacgacgaaaacaagaatatggcgagctgcacgctgcatatgtaatttttattctgccgtttgatcccaaaggaaaaggcttgaagcgatatacttttgtttatactgctaaggaagacccatcagttgaattaaatgacgattctgcgttaatatatttaaacacaaagggaacaaaaggcgagatcagacctgagcttgatgacctttatcgcatgattgaaggcaagccaacttcaaatggaaaactcgtcagtcgaattaaaaagtcgatgaacaattatcgtagaaccgaagaatggaggcaacacgtcatgaacacagaagaagtagcagaagcagcaaagcagcttggcatggaagaaggcatgcatgaggcaactgttgcagcaatccataaaacgattaacatgcttagaaggatgaagtgcagtcccaagcaaatcttgcaagaattagaacaagattatggcaatgaattttctgaagaagaactagcagactttgtgaaaaacgcctagtcgataagatataatgatagctgtgaagctatcattttttagataacgggggcttgatcatgaataatcctgaagaattacaacattttttagatgttctgctaaaagagagtaactttaccagagcagctaaagaattatatatttcccagccttatttaacgcagctaattggacgaattgagaaaaaattaggcactaagatcatcaaccgagatgagagaccctatacgttaactcctgcaggtctaatttactatcaatatttggagaatgtttcatataataagcagcaattagggcgcaagctggaggcatatactcatcctgaccaacagataattaaaatcggcattttggagagcttaggtacatatttattgccagaaattttgccgcaatttttgcaagaaaaccccaacgtcaagattcagctatttgaaaatttccccagagaaaatgaaagaagactgcttaatggcgagctggattgttatattggtcagacgccagaagcacttgactcgagtttagatgtggttgtgggtggcgaggaacgctattacgtagtgatttcgccagcctcaccatattaccaagcaggaaagtttatcttaaattcggatgaacttgatctaaaagaggtactgcaggagcctttagtgttgagttcacctggttcagctatccggcatcaagttaatggcttatttcagagattaagactcgaaaaaaatattgtgatggagtctaatagtattattactgcaactaacttggcaattcacggcgtgggtattaccatttcttcggcaagtattatcagaagaatggaacaaacgccaattaacttgttgccactagatcgaaagttaatggatgttgtctttttcattgctagcaaaagcggggaaaagtcgccagcgttagaaaacctaatttcaatttttcaaaagacgcatttacaagcaaaaataggataaagaaaaaggcatcatgcgatgccttttaaattgctttgatttctattgttttcgtttcatgtcgatcatcttcggctcaatgtagaagtgatagagaaaggaataaccaagcagtacaaaggtaattccttcaatccaaccgccgaatacatcagatggatagtgcacgtggacgaaaattctggtgtaaccaatcatcagtgggaataaagcccaaataataatcaataaagtcttccagaatttgcttctcactaaaagaatggttaggataatcaaaacaccaaatagcgccgcgctaccaactgagtgccccgatggaaaactataaccatccgcataaactaagtgcttgaccgttggacgctgccgcattactgcgtgtttgataatccaattatagccattagcacagatcatgacaccagcggtaaaccaagcgtatgcatattgcttaaagatcagtaaaactatgaaaacaatgattgtttcaattgtgatcacgcttgtattgccgagattagtaaaatctttagcaaaagcgacattagctggattattgttgcaaacaatgttgatcacagcattatcaaaattgtgaataaattgtgagccggatgaaacaagtgcggcccagacagcataaataaccacgaagcagataccaggtattaaggtgtccttaggtggtcgtttcgtattaatcaaaaaagtactcccctcttgtattttttagcatttgtggtaaattataatcattatctataagaaaataaaggtcgagaagtagtaacaagaatattttttcagagagaggctggctgctgtgaagtcttaaaataggattatgaactcgtctcgtgttgaagaaacctagcgttgccatccgcgttaaggagcaattaagtgtcacaaattgtgaaacttaggtggtaccgcgatgattcgtcctatgattttttcatagggcgttttttaatagtaaaggagaattattttgtataaccacaaagtagttgaaaagaaatggcaagattattgggcaaagcatgatacttttaagacaggcactgaccctgataagaagaattattatgcattggatatgttcccattcccatctggtaagggacttcacgtaggtcacccagaaggatatactgcaactgatatcgtttcaagaatgaagcgtgcacaaggctataatgtgcttcacccaatgggctgggatgcatttggtttaccaactgaacaatatgcattgaagactggtgaagatccagaagttgttactaagaacaacattgctaactttaagcgtcaattgaacaagttgggcttctcatatgattgggaccgtgaagtaaccacttcagatccaaattactacaagtggacgcaatgggtttttgaacaaatgtataaaaagggcttggcatatgaagctgaagttcctgttaactggtcaccggacttaggtactgttgtggctaatgaagaagttatcgatggtaaaactgaacgtggtggctacccagtatatcgtaagaatatgcgtcaatggatgcttaagatgactgcatatgccgatcgcttattagaagaccttgatgatttggattggccagaaccagttaaggaaatgcagcgtaactggatcggtcgttctgaaggtgcgcaagttactttcaaggtaaaagacagcgacaagacttttgatgtctttactactcgtcctgatactttatttggtgttagctatacagttcttgcaccagaaagcaagcttgttcaagaaattaccacacctgaacaaaaagaagcagttgatgcttacattaagaaaattgaatctaagtctgatcttgaaagaactgatttgaacaaagataaaactggtgtcttcactggtgcctatgcaattaacccagttaatggcaaggaagtgccaatttggatttctgactacgttttagctagctacggcactggtgcagttatggctgttccagctcatgatgatcgtgactatgcttttgctactaagtttggtttgccagttaacccagttattgaaggtggcgatattgaaaaggaagccttcacaggtaatggcaagcacttcaattctgagttcttagacggcttggataatgaagaagctaaaaagcgcatgattgaatggcttgaagaccataactgtggtaagaagaaggttaactacaagttgcgtgactgggacttcagtcgtcaacgttactggggcgaaccaattcctgttattcactgggaagatggtactacttcattagttccagaagatcaattaccacttcgtttgccacatgcaactgatattaagccatcaggtacaccagaaagcccacttgctaacctaactgattgggtaaatgtagttgatgaaaatgggcgtaagggtaagcgtgaaaccaatactatgcctaactgggctggttcaagttggtactacttgcgttatgttgatccacataatgacaaagaattagctgactatgatcttttgaagaaatggcttccggttgacctttacattggtggggcagaacacgccgtacgtcacttgctctatgctagattctggcacaaggttctttacgacttgggtgttgtaccaaccaaggaaccattccaaagactttacaatcaaggtttgatcttaaagaaccatgaaaagatgtctaagtccaagggcaatgtggttaacccagatgacgtgattgatgaatacggtgcagattcacttagaatgtatgaaatgttcatgggtccacttgatgcatcaatcgactgggacgataatggtcctgcttcaactaagaagttcttggaccgtgtatggcgtctctttgtaaatgaccttgacttgaaggcaattccacaagaaagaatcgttgataagaacgacggtgaattagacaaggtttatgcagaaactgttaagaaggttactgaagactttgatgcattgcacttcaacactgcaatcagtcaaatgatggtctttatgaacgctgctcaaaaagctaaaactattccacgggaatatgcggaaggctttgtaaagctattagcaccagttgctccacacatgatggaagaaatctggcaagtctttggccatgacgaatcaattacctatgctaagtggccaacttacgatccagctaaattagttgaatcaactgttgaaattatggttcaagttaatggtaagcttcgtggtaagttccaagctcctaaggatgcagatcgtgatgatctccaaaaacaagcaatggaaatcgaacacgtcaagaagttcttagaaggtaaagacgtcaaaaaagttattgttgttccaaacaagatcgttaatatcgttgctaaataagttaaatttttcctaaaagaacagtagaactttactttattgttcaaattgcgtgacaattaattagttaatacttatattgggaaaaatttcatggaagaagaaaacaacttaaatagcaaagatacacaaaatacttttctaaaagggtctgcttggatgacctttggctcgattgcctcaagaattttgggtgctttgtatattattccgtggtatgcctggatgggaccctacggaaatattgcaaatgccttaactgcacgaagttataatatctacacgatttttattctaatttcaacggcaggaattccaggagcgattgctaagcaggttgccaaatataatgccttaaatgaatacggcattggacgaaaattattccgtaaaggtttaattttgatgactattttaggcatcgtctcggcggcaattatgtattttgcttcgccgctactagcgtctaatggtagtcagagtgatccgaggcaagttgcggttatgcggagcttgtcttatgcgattttaattattccgatcttaagtatcatgcggggttacttccagggatatgccgacatgatgccgagtgcgatgtcacaatttgtggagcagtttgcgcgggtagtctggatgctgttaaccgcatttgtgattatgcaaatgcagcacggttcctacgttcatgcagttattcaatctaatttggctgccgctgttggggcactttttggaattggattgctagtttggtttttgctttccagaagagagcgactggactacttggtggcccattcaaataatcgtttgcgagtttcaaccactgatttatttggtgaaattattgctcaagcaattccatttatcattattgattcgggaattaccttgttctcattggttgatcaatacacattccaccctatgattgctagcttagttcatgcaagctcagatacaatcgaagattggtacgctttatttggcttgaatgccaataaattaattatgatcatcgtctcattagctagtgctatggcggtaacagctattccgttactatcggctgcgcatactagaggagactacaagagtatttcaagtcagattgccaatacgatggacttgttcttgtttgtcatgattccagctgcctttgggatggcggcaattagtaaaccaatgtacacgattttttacggaccagatccattaggcagcaatgtcttatatatatctgcatttacggcgattagcttaggtttgtttacggtattaatggcaattttgcagggtttatcagaaaatggcttagcgattaaatatttgatcttaggcttgattctgaagggaattttacaatatccgatgatctttttattcaagatctacggtccgctagttgcgactaacttgggtttgttggtcattgtattcctatcactgaagcatttggaagttcaatataatttcaatttgaatcgaactagtcgtaggctaatgggagttaccgcattttcaatcgggatgttcctgattgtaaaattagtcgaaataggcttaggtaagttcttgagtccagagcgaagaattccggcattattcctggtaatcttttctgtgggagtgggcgtgatcttttatggtttcgtcaccttgaagacagatttagcacaaaagattcttggtagcaaaattgaaagtattttagtaaaatttcacatcccggatttaaaattgaagtgcaacactaagtgttaaacaaaaaggccatgaagacctaaacttgaagtgacgaaaaatcaagaaaggaagatcttcatgaccaattcaaattctagcatttctaagcactatcatcaattaaccagcgtacaacgtggacaaattcaagcaatgctggattccggcataacttcccgtactgttatcgctcaagaagttggctgccataagtcgacaatcagtcgcgaaatcaaacgcggaagcgtcctgcaaagagacagcagctatttattgtatgagcactattacgctgatactgcacagatttattatgagaagcgtcgcaaaaactgctatcagcgcaatccattgaagcattatgctgtctttttgagaatgctctccagacgctttaaagctaaatttgatgccaccagcatcgatgagttcgttggtgaattcaaaaggactatgccaggctacccttgtcccagcacaccaaccgtctatcgctatattgatcagggcttgctggacataagcaatattgatctgcctatgaagctcaaaagacgcaggaacaagcgtcatcacagccatggcggtcacgctttgcacaagaagcatcttggcaattccattgaacagcgtcctaaggaggttgaagacagaaaagctccgctgcactgggaaggagatctggttaaaggcgtcagacgcaagaatcagcctgctttaatgactttgactgaaagaaccacacgctttgaagtagttatcaagattcctgactatcgggcaagcacatgccaaaggctgcttcaaaaggagattgacagacatcctgcctggtttaaatcaatcacgtttgacaatggctctgagtttgcggatatgaccaagatcaagggctgccagatttactttgctcacccatattctccatgggaaaggggcaccaatgagaactgcaatggtcttttgcgtcaattcttccctaagggcaagagcatgaaagacaagtcaaaagcttatgttcaacaggcaactgatgccattaaccacaaatatcgccgaatcctccaatatcacacagcagaggaactcttcaagcaatatatctcttcataacctaactgttgcacttaatttgacaattcagggtaaaatttcacatccatgactaaaaataaaagtcactacagatcaaaattatgatctatagtggcttttttagtgcgttggatcctgcgtgccaatccattactaataattttaggagtgctacttaaaatttaagaattagtcaggcgtaatcgccgttaaaacaaagaccccgattagttcaagtgctaagaatgtaataccgatagaagcaatcatgattctccatctcctcatcttagagataaatattgagatttatcttttctaatcacgtttattctttacgcttttactgtaacacataatctagtgaaacgaaagcggtttcatgaaagcgagagaaaaaagttgattcccgaagaaatcaactttgtgcccctgccaaggacctacattatagcattcatttattcttggttgtcgtcttttttttcgtcagaatctgaactagaatcatctgacttggtaaaatcaccgttcattgtattaggacgaccagtttgataatcagtagtgtgtttttcggctttaggtgcaatttggccaggttctggcatgaccattgcagcgatgatatataaagcaataccagggaagataccagtgaataaaattaaggcggcaccgatgattcttacccaagctgggtcaagatcgaagtaattggcgattccgcccaaaacgccagctaaaattttgttttgtgatttagtaagtctctttttcatagtaatcaactcatttctaaatttgatgtccttcaatgtgtattatacagcagagatacgcgtggtgctagttaaatcgttctagacaataagccaaattataagctaaaattgcaatttccaaccggctttgaaagcctatcagactacgtgctcgattgttctcggcattgtaataggtcagaagcgaaaagtcgctttcaattgttctgcgaatagccatcaattgatgatcattgtgctttttagctcctgtcatatttttacgatatggtgtccaaagttcgtaacccatttgttttagctgttgatgcagttctttgcctaaatagccttcgtcgccaagaagatagtaattagatggatgggtattttctatcagttcaactgtctccctggcatcatgaactgatgcctttgttacgacataatcaagaatgtaaccgtcatcgctaacaatggcatgaactttgaaaccatagaagtaaattttcttggtggccttataaccaatgttggcataaccgcgaaaaattttagcacgatagtttcgaattggttggcaaacaggtaccggaaagctgtcaatgatcaagaactgtccattcaggtcaacctttttattcatttcttgccgtatctgataaatcaattgcaatagctgacgtgaacgccgattaaaacgtgagtgtgataaacaattgaaacattcacagaatcttctttgtgattcaattcctgtcttagcttgccagataagtaaagccaaaatcagactgtccgtagttttaatttgatcaatatttcgccgatgagtaaactcagccggtgcatacaaacgataccagtgccgacaaattatcactaaatctttaaaactaacttgtaaatggtggctaaaacgcttaagcttaaggcagttcaatcagatcagactcttttctattattactatttacaagtcgagtctaacaagattggacttttttattaactaaaacgatttaactagcaccacgcgtagcagagattaataaaattaagagctataaattctattattaaaaaataaaaaaagtgttgatctctcaacacttacacataattatgatgcccgctaaaggattcgaaccttcacttagtcacctaaacagcgacctgaacgctgcgcgtctgccaattccgccaagcgggcatttttattagctacatgaataataataccaaatatttggtaaaatgtaagcataaaatactttaattatacaaaaggatggaatttcatgttttttagtaaaaaaataaaacgtgtagcaattacaactgttgcagctgtatcaatcttttcgtgcggtgcagtttttgcgactacgcctgttaacgcagatacaactagtagctatcaagctgatcaagttaaactaaatgtaaagtcagcaattgcaattgatagtgattcaggtcaaattttgtatgccaaaaatgcgactaaaactttgccaattgcttcgatgactaaattagtaacagtttatttaactctgcaagcaataaaaaatcataagctttcatgggatcagaaagtaaagccaacggctccgatagtaaaggtagctaataatgcagaatattcgaatgtaccattaaaactaggacattcgtatacgataagacaactttatcaagcaaccttaattgaatcagctaatggtgccgctatgttgcttggtcaaactattgcgggctctcagaaggcctttgtggaccaaatgcgtgctcaagtgaagaagtggggcattgaagacactaagatttataccgcatgtggtttgcctaatggcaatgttggtaaagatgcatatcccggtgtaaataaaaacgcagaaaattctatgtcagccaaagatatggcaattgtagggcaaaatttaattaaagattttccggaagttttggatactaccaagttagctcacttagacttcaaagatgccggtcacgctaccaagatggctaacttcaactggatgttaaaaggtctttcacaatatgacccagcttatccagttgatggtttaaagaccgggactactgatgctgcaggggcttgttttatcggaactgtgcaacacaatggtgctcgtttgatcaccgtagtaatgggtgcacgtcaccgtgatggtactgacccagcaagatttatgcaaaccaagaagttaatgaactttatttttaccaaataccgtcctgttacgatgactgcaggtagccaaatgaatggtgccaaaactattaaggtaactgatggtgataacgcaacaactaacttgggtctaaagaacaagactactatttgggatccagcagatggcaaaactttggttgcatcattaaacaagaagacagttgaagccccaattaagaaggatcaaacaattggtgactatcaatttaaatctggtaatgaaaagattgtttcattgtctaatcctaatgggatgaacgtcaaggctaaggcattgtcagctaataacaaggtgaacttttttgtcagaatttggcgctggattttcggaggaagataaatatgactgaaatttctgaagatatcttgaaaaaggtaattaaagaaagagaaagcgatacacataaaggcgattacggtcgtgtactcttgatcggtggtagtgagaactatggtggcgctattattatgtctaccgaaggcgctattaatgctggcacaggtttgactgctgttgcaacacaccctttgaatttagcatcgctacatgcacgagtgcctgaagcaatgtttatcaactggcgtgatgctaagctagcagatttaattaaaaacacggacgtcgtaatttgcggtccagggttagggatgagtgatctcgctaaacaaattttagttatcttaagaagatgcacttcagaaaaacaaacagtcgtcttagatgccagtgctcttgatttaattagtcaggataagaacttattgccaactaatgctggccacttaatcttgacgccgcatcaaatggaatggcaacgattgagtcaaattcgtattccgtttcaaacagatagtgccaatattgatgctttaaaccaattgattccagatactaatgcgcttttagtactcaaatcgaatcatactcatgtttataatgggactggtcaaatttttgttaatccaattggcaatccaggcatggccactggtggaatgggtgatactttagcaggaatcatcggtgggatggttgctcaatttggcccaggcgttgaaaccgttcaatctgctgtctatcttcattctttagcaggtgacttgcttgccaaagataattatgtggtacgaccaacggaactttctaaagtattgcctaaattgatgaaaaagtattgcctaaattgatgaaaaagtattcagaattggcataaacatgttaaaattctaatagtaaataaatgcatccctagttgagggatgttttttaacgcttcaaagacgaaaaagcataatataattgagttaaatattaataaaaaagaagattaacatattcatgaaaaaaaacattattatcggcgtaactagtatcgttctagcttttggtgcaattatcggcttagctaaggtatgcgcacctaagtctgatgtctcacaagaagctgctacaacgcagactaaggccaaaactaagaaaataaataaaattaagaaaaaacaagctaaaaaagtagataatggtgctttatatcgaccatatagcgatcctaaggacttgcgcaaggcaggcacttggaagaaaaagagtgagcctaaaaaatatcctaagattaagccgtatgaaaaggatttgactttgcgggtatcattaaaaggaaaccggacctatttgttaagaaaaggcaaggttttgtataccatgttatcaactggtggaatctacaagaagggcaagtcattgaccccaactggaacttttaggatccaaaatggtcgtggagacagctttttcaattataacttaggtgaaggagctaataattggactagttggagtcctgataacgtgtacttgttccactctgtgccaactaaagctgattatagctataacttaaaagaagcagccaaattgggaagaactcaaggttcacatggttgtatccgtttgagtgtacctgattctaagtggattatggatcacatcccagatggtacgaaggtagtcattaaaaataattaacaagaacgttgctttttaagcaacgttttttaaaaaattgcagtaaaaaactttgttcaaagcgttcaagattttaatccaactcaagaatggcttttttaactaaattagtggcagaagccgttttttcctgctataatcatgtttgccaagaagtcaaaagtagtagttattttctttttaagcgagtctatgttggtgcaagatagatactagaagataatgaaggcgtgtttgactgataaaatcaagaatttaaataagcggatactttgtatcaatctgagtggtaccgcgggtttttaactcgtctctttctacatttgtagaaggagacttttttatttagaagagaggaataagatggactttaagaatgaagtagttgacttggttgctagtcaagttgatttacctaaagaaaaaattgctgcattaattgaacgccctaaaaatgctaagatgggagactatgctttcccagcatttattttggctaagactttgcacaaaaatcctgcagaaattgctaaaaatattgcggataacttatcaagtgataatttcgctaatatccaagcagtcggtccttacgttaactttgcgattgatcatgaaaaattagtttcatcgactttgaaggatgttttgactgaaaaagaacattatggtgatcaaaagattggtgaaggaaatgtgccaattgatatgtctagccctaacattgctaagccaatgtcaatgggccaccttcgttcaactgtaattggtaattcaattgctaagacaatggagaaggttggctatactcctattaaaatcaattacttaggtgactatggtactcaatttggtaagttgattgctgcctacaagcactggggtaatgaagaagacgttaaaaaagatccgattatgaatcttttccactactatgtaaagttccaccaagaagctgagaaaaatcccgaacttgataatgaaggtcgtgaatggttcaagaaacttgaagacggggatccagaagcagttaaactatggaaatggttccgtgaggtttcattaaaagacttcaagcgaatttataaagaactaggcgtaacttttgattcatacaatggtgaagctttctttaacgataagatgcaaccagtaattgatgaattaaaagaaaaaggtcttcttcatgaatcacgtggtgcgcaagttgttgacatgggtgaaggtgaaaatcctgctattatcgttaaatctgatggtacttcaatttacttaactcgtgacctcgccgctgctgaatggagaatgaaagaatataacttcgttaagatgctttatgttgtaggtaacgagcaagcccaacactttgttgaattgaagactgttttgaaaaagatgggttatgactgggctgatgaaattcaccacgtaccatttggtttaatcacccaaggtggtaaaaagttatctactagaaaaggtaacgttgtcttcctcgatcaagtattaaaggatgctgtttcacttgctaaaaaacaaattcaagaaaagaatccagatttagcagatcaagatcaagttgctcatgatgttggtgttggtgccgttgtcttccacgatttgaagaatgatcgtttagacaattttgactttgacctagaagaagttgtgcgttttgaaggcgatactggtccttatgttcaatacactaatgctcgggcacaaagcgtcttacgtaaggctgctgcgatgggtgaaaatcctagcgaaactgatctagctcttgatgatgactgggcttttgccgtagccaaagatttagcagatttcccaagaattgtagctagaagtgccgaaaagtttgaaccttcagtaatagctaagtttgccttagatttagctaaaaaattcaataagtactatgctaatgtgaagattttaaccaaggacgataaaattggtgctcgtctcgccttagttcaagcaacatcaatcgttttaacggaatcacttagattgttaggtgtcaatgctcctaaagaaatgtaagagaaaaacaatgaaaataagaaaataacgcttacattctgtgaaaaattgttcatatttcaattattagggtacaataggcatgtaagatatttaggaggtattttttaatggcttattttgacaacggtaatcaaatctttaaagatgctcgtaagaaccattacgctgtaggtgcttacaacactaacaacttggaatggactcgtgcagaattacgtgctgctgaagaaactagaactccattgttgatccaagtatcaactggtgctgctaagtacatgggtggttacaagttcgttaaggacatggtagctgaccaaatggattcaatgaacatctcagttccagttatcttgaacttggaccacggtgactttgaatcagctaaggaatgtattgcacttggttactcatcagttatgtttgatggtcacgcacttccaactgacgaaaacttggaaaagactaaggaaatcatcaagttagcacatgaacgtggtatttcagttgaagctgaaattggtaagatcggtgaaaaccaaggcggcggtgaattagcttctgttgaagatgctaagaagttcgttgcagctggtgttgacaagcttgcttgtggtattggtaacatccacggtgtatacccagcagactggaagggcttaaacttcgaccgtcttaaggaaattgctgaagcagttcctgacactccacttgtacttcacggtggttcaggtattcctgaagaccaagttaagaaggctattaagcttggtattgctaagataaacatcaacactgaattccaattagcattccaagaagctactcgtaagtacatcgaagacgaaaaggaccttgacaagaaggctaagggttacgacccacgtaagttgttattgccaggtgcagaagcaattaccgccaagatgaaggaaatgatttcttggatgggtaccaagactatcgatgacgaacttaaggatgcttcattcgaccgttcatcattgaacgaagaataatcatttgataattatttaaataaagtctagcgtttgctaggctttattttgttaggcaaatttggtgataacttaattgaacctattataaaagaaatataaaataaaaaattgaattataaagaaagtataaaaagcccggatttaaaattgaagtgcaacactaagtgttaaacaaaaaggccatgaagacctaaacttgaagtgacgaaaaatcaagaaaggaagatctttatgaccaattcaaattctagcatttctaagcactatcatcaattaaccagcgtacaacgtggacaaattcaagcaatgctggattccggcataacttcccgtactgttatcgctcaagaagtcggctgccataagtcgacaatcagtcgcgaaatcaaacgcggaagtgtcctgcaaagagacagcagctatttattgtatgagcactattacgctgatactgcacagatttattatgagaagcgtcgcaaaaactgctatcagcgcaatccattgaagcattatgctgtctttttgagaatgctctccagacgctttaaagctaaatttgatgccaccagcatcgatgagttcgttggtgaattcaaaaggactatgccaggctacccttgtcccagcacaccaaccgtctatcgctatattgatcagggcttgctggacataagcaatattgatctgcctatgaagctcaaaagacgcaggaacaagcgtcatcacagccatggcggtcacgctttgcacaagaagcatcttggcaattccattgaacagcgtcctaaagagattgaagacagaaaagctccgctgcactgggaaggagatctggttaaaggcgtcagacgcaagaatcagcctgctttaatgactttgactgaaagaaccacacgctttgaagtagttatcaagattcctgactatcgggcaagcacatgccaaaggctgcttcaaaaggagattgacagacatcctgcctggtttaaatcaatcacgtttgacaatggctctgagtttgcggatatgaccaagatcaagggctgccagatttactttgctcacccatattctccatgggaaaggggcacaaatgagaactgcaatggtcttttgcgtcaattcttccctaagggcaagagcatgaaagacaagtcaaaagcttatgttcaacaggcaactgatgccattaaccacaaatatcgccgaatcctccaatatcacacagcagaggaactcttcaagcaatatatctcttcataacctaactgttgcacttaatttgacaattcaggaaagtataaaaagagacttttatggaagaaaaaatgttaaatccatttatgcctagctttggtcgttttcctaaaattattattgatcagcaagaggcattaactgattacttaactggcttacaaacgcacgatgctaagtatcaaacttctttagtctatggcacaaggggatctggaaaaactgtttttcttttaaatgtgcagagatctttagcaaagctagataattggatatttattcgtttaaataatggtcaaggaaatttgctttttcaattaatgcatggtttgcaacgagttgcaggtatttcgttagttgacttgttaaaaagtgttaaaagtttgaatattatgggaaagggaattacttggcaagcactacaagaatcacagcaaattgattatgatgagtatatttcaattttgctaagtcgattaaagaaacaggggaaatcaattttaatcggaatagatgaaattgaaattagtgatgatgttcgagcttttggatcagaatatcaaacattgattggtgatgaataagatatttcattattgatgacaggattgccaagcagaatatccgaagtacagtatgataataccctcacgtttttactacgtagtaatcgtgtttatttatcaccgttggataaaaaaacaatagctaatagctatgagaaagcatttactaaaggaaaacgtgaaattgatttcatggtattggatgaaatgagccgtgcagttaaaggctatgcttatgcctttcaaacgattggttattatgcttggcgatttagtcgggaattattgcagttaaacgaagaagttttgaaacaaacaattcgagctgcaaaaaaggacctttttaggaatgcctatgaaagaatgtatatggatctttccaaaaatgatcgcgattttatcgaagcaataatcaaagctggaaccgatcgtgtcacgacaaaacaattgcaagatatcttaaacaagccgattaattacatttcggtatatcgagcaaggctgttagatgaccaattgattacatcccctcaaagaggagtagtacaattggcgttgccattttttgcagagtttgttgaaaaatctaatttagaacatttatcttagaaaatgagcaaatataataaattatggcaatatatcaaagataataaggctggggactttgagctttcttttgatgagcttggccagcaggctggggttgccttagatcattcctttttgcgttataaaaaagaattaccagcttatggctttgaggtgcaaaaaatttcattgaagaataaagtggtgaagtttcatcagttgtaatgaaagctattaataactaaagtagtagtttgcgataatatcttcaaaattagtaactatgttttgttttagaaaaagactaagatgtaagtaaaaaatgggaggattaataagttactatgaagaaggttttatcttggccagtatattatcaactatcagagatttatacggcgccattaaatgtaatttggtttgtctttggcgcggcaatgtcgtttcaacaatatcacatgtttaatttgattaacattttactgtgcttagtagatgtttttctgtttgatttagcagttaatattgctgataattactatgattatcttcatggcaaagatcgacattttttgactgatataaatccaattggtcgtctgaagttacctttaactgatgttagaaacttagtgtggattagttactttatttcggcgattccgggtattattttggtttatcgcaccggctggccagtactaataatgggagttgtaggatatttcattggaatattttacactgcgggtcctaagccactgaatgcaacaccgatctgtgaattagtggtatctttttttatttcgtatttcattatgctagtaagcatctatgtcacaatttacggcacttatcctttgacctggaacttagcattaactactctgataagatgtttgcctttaacactcattttctatgctttgcagttagctaataatacttgtgatttgcatgaagatttaaacaatgggcgccatactttagccagttatactggtaaaaaatatgctcttaaaataattaagacgttgattattgcgggattattatttccaattatcgttgttctttttggtttagcaaaatggccattgatctttagttgttttttgttgccaatattatggcaaaaattaaaacaattttttgagcatccggataaacaaactacctatttacaaatgattaagtatttatcaatatttttcattacatatatagctatttatacagttttggtggagactgtaaaatagtttgtgtaaggatgaatgattccttaaatttatttctttaaacattagaaaaaggagttcctttctcgtatgattggtttgaacaaaaaaacacatacagaaagaagaactccttcatgaatgattttaccaaagattttgctcaagctctattcaatccagacaaaagtaagtgtcaatgtttttgcggtagcctttaaaccattagtctaaccttaatttcttaaatatttatatgacttaaatttctgcttagcttgcttaaataactattgccaactacctgtgcggttaatgcgccatgctggatgcctaaatgaacttcatgacgcttctttaagctgtcacgggccgctgcttttaattcctgttcagtcaatacagttatttctgaatcttcaaactcgctgctaagccaaaattccagctctcgattcttgatgcagcttaagatcctaagcatgccttctgctccagattttgaccatttcttgccttgccccttaacacggtaggtatacttgcggtggttgctctcgcagcagccaatggctttagtcacagtcagttttcgtttcttaaacggcttaatatcgtcccaatgacgatcaatataattccttaggcgccccagataatcatgattgagctcggtattcaattcatcaattagtcggctttctgcagtggttaggatagttttaactttgtcatagctgtatttgtattccaaagcagaaatcagcttgccttgcaggtcaggcgcaaaatatagcctttctttgattttcttatttaggtgaaagacatccaagaaatgctcatgacgcttgcatagccctacaatgtcatcgaagtctgttttggcatatccagcaccgccatcggcgttgctaagaattacagtatcagaaagatcataagtattggccaggtactccttggcttcgttcagcgcatcaagtcggcttaaagaaacaaattccttggcattgattcgctttctgcgtttcttgcttatattgacaatgccttcacagacctgatagcgatgaaattccaaccggcttttagtgcctttgatcaccacgccatcgccttcaagatacaaaactgggacctttttcttagtgcctgcggcatcatatcttgaatctgcttcttggcccgctttaatatttttcccggccatttttaccaaattgcccacctgcatatggctaatattaaagccagacaggcaattgactgctagagcagtattgcgataagtggcaacgctgcttacttctaagatgtttttgactgctaaaatactgtagcgcttgtatttgtcaaagcccattaattcatccaagggataccttgcttgtttgcctgggcagacatatcttcttctgacatacctaacttcgccaaaagccatattgattgagcgctcattcttcttatcaatctgatagccctgtgctttaaccttggtaatcatttcatcatcaactttagctaaagccaaggccatgatttccttaatcaggtttaagaagaaacagattatttttctttcacgcttaatataattatcttcagactttataatatttgcgatttcagttacaattgaattcataaaagaccagcttctaatgtgttttttgttcttaacatcagactactggtctttttgtttgagctcaagtccaaattcaaaggacttgggcttttttaattatttattcaacttaccgtaaaaaattatacacttagcagacaaaataaatgatttattgcgcaaagagctacaacaggctgttaataacttgttagaagctgaattgactgcctttctgggctatgattcctatgccagaaatggctggaatactggcaactctagaaatggtgcttatttccgcaaagttgatacgcaatttggcccaattgaagtgcaagtgccccgggatcgcaacggtcaatttcatcagcacacgctgcctgactacaagcagcactcggatatcttggaaagcatgattatcaagctttactccaagggcgtgaccaccagggaaatagccgatctaattgaaaagatgtatggcagccattacagtccagctcaggtatcaaatatttccaagcagatgattccaaaggttgaggcttaccacaaacgcaagctaagcgacaagtttttctgcgtctatttggatgcgacataccttcctttgcgccgagaaacatttgagcgtgaagcagtctatattgccattggcatcaagcctaatgggcacaaggaggtcattgactactgcattgcacctagcgagaacattgaagtctggacagatatgcttcaaaacatgaaatcccgaggcttaaagcaagttgagctttttctttctgatggtgttgttggcatgaaaacagccttggccaggacttatcctaaagctcattttcaacgctgtttggttcatgtcatgcgcaatatctgcgctaaagtacgcgtcgacgatcgtgaaaagatcatgaacgaattcaaacaggtgcatcaacagacaaacaaagaagaagccacagctgtcctgcatgacttctataccaaatggggcaaggtttacagccatgttatcagaagcttgaaagacatagaaccagatctgctggtcttttataactatcccaagcagatcagagcttcaatttattcgactaacatgattgaatcatttaacaatgtgatcaagcgcaaagctaagccaaaggcagagtttccaactgaacagtcgcttgatgcttttattggcattcaggcaatgagctacaatgaccgttatttcaatcgaattcataaaggctttggtcaggttcaggacaccttagaatcctactttgattaaataaataattaaaaaatcaatttacgagaaagaactatttacacaaaagatttgacagtttccaggattgcattactatagtttatgtaagttatgaataggtagtaagtaacttatgaatttcaagatattcattgatttaatgaggagaacgaaaatgaaaattttcaacaagaaaaacttattattgtcatctgcagttgttgcagggatgctattcacagttggtactaaggctgttcaagctgatacaaccgatagttcacaacaagcaactacaaatactttaaaggtaaatgcaaatactgcagttccagataagaatttgattacgccagtagctagccgtgataatcaaactcttcgtcaagttgcagaagcaaacaacacttcattaagtgtattggaaaagttgaatgataatattgatccagataaaaccattgctaatggcacgccattatatcttccacaaaatgaagatttgtcaggactatttggtatatatcttagatcagatacttcagttccaagctcattaaagagaaaatattatgatagtctttcagcaaaagagagagctgctaagatgtggattattgcacgtgaatctggtggaaattacaatgcaagaaatggtatctatattgggcgttttcaattaacaaatacttatttaaacggaaattatagcaaagcaaatcaagaaaaaacagccttacgatatgttaagggacgttatggttcatggtcggcggctaaaagattttggcaggctcacaactggtattaataaataaacggaaagtggaaaaaatgaaatttcaaaaattagtaactagtgtattattagtagctagtaccactggtgtattaatgactgcacctaaacgggttcaagctgtagctgataccaatactactgagagtggaaaacccgtcgcaaatattgttaataagcctaacctaacaaaacaaggttatgtgttaactattcaagccccatcagggaagatttatgtagggcaaaagaattacaagaaacaattaactactactaagccaatatctaacgcaaaatcagttagttggaagaaaattaaaaacgttagatttagaattgaaaaagttgcttatgcgacaaaggttataaaatttggtggagcaccacagtatctgcttgtctctaaagataaaaaatatagttgctggacaacgcgttattctattaaatactatttttggaatactaaaaagatgcaacaagtaattaagccattgtctaaattgacaactagaaactcttcaagcctaaagaagattcggaataagcaagattttaatcaagctgtattagctgctaaaagattacctgctaatcaaagaaaagttgtcttagaatctttgaatcaagtgaaaaaagttggcaatattgataaggctgaagataatattttgttgttcagcttttagtgatatttctagcacagatttaaaattaatataaaactgaagttagaagaatttatttaatgttgagggggaagaaattgtgagaagtatatctaaaggcattgtatctttgatagcagctacaatgttattagcagcaggggaagggatagttcctaatactgttaatgcttctatgctagattcggctaaaagtagccagaatagtcaagaaagtagtagatacacttggcagagtgttaagctaacagatggaactgaaatgcaaattcttccagataattcttcaaaattagctggaaagattaaatataacggtcaaatatattcatatcgcattgtttcaaataatggtgtatatactatttatttgaataatgaggaagtatattcagttgatataaataatagccagttacctacgacaagtgtaggtggttttgatccatttattaattttacgtacgcaaatggtaaggtagcatttaaacatgcaggtagaaagtattattatttgacgacagagaaatatagtgcagatacggtaagaagactgaaaggaactactaaggatattattattggtttgcttggatttgttcctgtagttggcccctatgtttctgccggcggttttgcctatactgtttataatgatatttttggaaagaatcctaaaaataaatggtatacgataaaagaatattgcactagagggtatgaatattatgcttggaagacctatacttatactgactctcatagaaaacatctacaatctgttaaatgggagtataaaaaagtattatgagaggaattttaactagtagagttgctagaggcatattagcgtttatatttatattttttacgggttggtctgctgcaagattaatagtacagatagaacgttctgaatcgatatatgactaccttattttgggaggatttagtctagttttaggtattttggaactctatagattaataaatagtaagtaacctgaaaattttagaaaattgaacgttaacgtgaatatcaatataacacgcttagcttaaatagtcttattacttaaacttcccacacgcaaaattgcttgtttcattgtgattctgcgtgttttgacaaatataaaaggcacaagtccttttcattgctataattatattgaccaaaacataatttatttgcatgaaaggcttgtgccaatgtctattttaccatctcctgaccaacaaaatgaacaactattttccaactcaatcatcagcttcatcaagaagtttcaggtgatcaagctgttgagaaaatgtggcttccgcaaggaaaaaggcattagcctgttcagcttgtttctttacgttttaagcaatgtctttcgtgaccgcagcttatatatgcagctgaaaatggatcattttcaagaaaatttttccaagaactcatattaccgttttatgcgcaacgttcacgtcaattggctccacttcaccacacgtctgtctgcgcaaatcattaataaccacttgcgatctttgacttcagaaaaacgggctgattgctttgttgtcgatgattcctacttctctaggaccggcttcaagaaaacagaattagtcgccaaagtttttgaccatgtatcaatgacttacaagaaaggttttcgcatgatgaccctgggctggactgatggagcttctttcatgccaatcaattcagtgctgctgtcttctcagaagctacagaatatgattggcgaaaataaagtttttgatcagtgcaccattgctggccaaagacgtatgcttgcccggactaaaggcacagacgtgatggttaatttaatcgaccaagctatgaaagcaggtcatcaagccaagtacgtgctgtttgacagctggttctcaaatccacatcaaatcgtccagctcaagcaaaggaagctggatgtgattgccatggttaaggtgagctccaaaatcaaatatgaatttgagggagaacgcaaaaacatcaaacagatttatcgcagctgtaaaaagcgatgcggccgttctcgctacctgctgtcaatcccagtcaaagtcggacgccaggacaaagacggtgctaaaatagatgcacggattgtctgcgttagaaaccgtgccaatcgcaaggattggctggcaatcatttgtaccgacatgtcgcttagcgaagatgaaattatccgcaactacggcaagcgttgggatattgaggtttttttcaaaacttgcaaaagttatctaaaactaagtacggaatatcatggcctgtcttacgatgctttgaccgctcatgttgccatagtttttactcgctacatgcttatgtcagttgccaagcgggacgatgaagatgaacgcacgctaggcgagctgttctattgcatgattgatgagctggcggacattacttttagccattccttgcaattgattactgatgcaatgctggccagcgtaaagcaagtctttcatgccagtgaagcacaaatagctgaattcacggctgactttatcaatcgtttacccaaatacatgcaaaaattgttaaagaaaactagcaaaaataatatagaagcctaaagccaagcaagatcaagagattactggcttatttagtgtgggaagtttaagttattagtttttataattcagtaagataatcggcaaaatggtaatatttagttgtagtcgcttcaaaggataaaaagtattcaacttggattactcaagctttcttgcaatactactacctaaacagcaagtctatgcaaggtgtgattaagccactcaagcgaattgctaatagattaaatactagtctgaagaaggcaaacaacaaacgtgactttaacgctgcaatgaaagctgctaagaagttacgtggcagtcaaagagattttgttttacgttcattgaatcaacttaagaaggatggctccatgaatgtagaaggaaagaacttgttattgtttggcttataaaattaagatattaagtagtaaagctcagcagaattactgagctttatttttttgtgaacggtagtcggcaaacagtataataaacttataccaaaaacattgaagtggattatatttagaaaagaagatggaaaatggctaaaaagttacgcacgcttggtattagcgattttgtcggcagggatgctctcatttttaggaatattggatgaaacagccacgacagttacttttccaacgttaattaaagaattttcgattaccactgatcaagttcagtgggtaaacacactagtcttattggtaattgcgactatcgtaccgattagttcacagattagattaagaatttcgactaagaaaatttttattctaggagttcttttgtttactttggggctaatcatcgatattttatcaccgcgctttgatttattgttattaggacgggcaatgcaaggagtcggcacggggattggcttaccgttaatgtacaatattatcttggctgaagtacctaaagaaaaactaggctttatgatgggaatcggcactatgattactgcctgtgccgttgccttagggccagtttttggcggaatgattaccgatgcacttaattggcgctggatcttcattatttcgctatttttaatgaaaaacgcccggaaattccccgtattttaatgcggggatggatagggccaagctgacctaatggtcagctttttttattaaaaaatgaagacatatgttcgactttcctgtaaaatataaatatctaatctacagaaggaggtgaaacacatgaagagaatgagcagtttagcctaccattttggcttgaaagtacgcttttatcctagttctaaacaaaagaaaatcatcaagctaaattatgatgctcagcgttttgtctacaactcttatgtaggacgtaatcggaacaattatcgggctaagggctacttagctgttagacaatatcaagtaatgccttttgccttttctgttcttaataattatgagactaagctagcagaagaagtagtcgccaataatgagttattggctaagccaaagaacattcgcgatgcttatagctttttacgcgttaaagaaattgacagtctcgctattgccaatgcgattcaaaactatcagaaagcttggaacaactatcgcaagcttggtcatggaattccgacttttcacaaaaaacgtagtgattggtcatatcagaccaactgtcagtatcctaaacagacagaagcctttcttgataacgggacagctagatttattgatgctaagcacgttaaattgcctaagctaggcgttgtccgcattgccagctttagaaaattgattaaagagcgttttcttaatcatatcccaactagaattggcacagtcacgattaaaaagaccgctgacgaccagttttacttatcaatgcaactaggcagcgatattgcctttgttaaggaattgcctaagacgcagagtcaaattggcatcgacctcaatcttgataatttcttaacagcatctaacggagcaatggtggctaatccacgattttatcgcaaaaccaaaaagaagcttgcccatgcccaacgtgtcttgtctcgcaggcagcgcagagctaagaaagagggacgcaatttgcgcttagccaagaattatcaaaaacagcgtctagcagtcgctaaactgcacgataagattcgcagacagcgaaatgacttcttgcaagtactctcaactgcactaatcaaaaaccacgatttagtagttgccgaggaattaagaagcaagaacctgttaaagaatcatgccttgtctcaagctatttctgatgttggctggcgcagttttctgaacatgctggcatataaggcagacctatatggcaaagagttcaaaacaattgatcctaagtacaccacccaaagatgccatcaatgtggcagtattatgggacaaaacggttataagaaattaacgcttaaggatcgagaatggacttgtccaatctgtcaaacgcatcatatccgtgattggaatgcggcagtaaacatcttagaaaaaggcttaggcaactggcagaattctaaaataaaaaaagcagcctaagctaggctgcagtccgctagcaactcgcggactcaaaaggctttggtaattagacgacctctatcggcaatagtcaaaagattattgttggtaagtcaagtccgtatctaagcaagttggtgttctggttagcgcaagctaacgagccagccaccaagccccagaatttattctggggtagttgacttatcttgagtctatttacgggaagctattcaattcggcagattaatccgcttgaaaaagtgaagttcaagtatgtgcaatggctatctttggctattgggctggtctgtttaatgctgggctttacgcggattgctaaatattcatttttctcaatccgagtttggggcttcttaatcttaggaattattagtttattaatttggctcaaaatatcttggtccgataaagcagcattgattagtccgcaactgtttaaaaatttacgttttagcatgcagttaatagcttattgctttgccaaaattgcgacgctagctttgggttttatctttccaatctatgtccaagctgtcaatcatggttccgtttcattagccggttgggttacttttcccggtgcggtaattactgcgttaatggcggccttagcgggcaagctgcttgataaaaaaggcgcgcggttgccgattattataggaataattgctagtttgactagtttaattttgatgaatgttttggcaccattaagcaatcttgccattgtattgttatatgttctttattatggcggatacgggatgtgctttggcagtttaatgactagcggtttgattactttaggtaaagctagccacgcacaaggtaatgcgatttttaatacgttgcaacagttttcaggtgcactggggactgctctttagctgggactttgattgcgctagcgcagaataatcatgtaggtaatggtagaaactgtcaaatcttttgtgtaaatagttctttctcgtaaattgattttttaattatttatttaatcaaagtaggattctaaggtgtcctgaacctgaccaaagcctttatgaattcgattgaaataacggtcattgtagctcattgcctgaatgccaataaaagcatcaagcgactgttcagttggaaactctgccttaggcttagctttgcgcttgatcacattgttaaatgattcaatcatgttagtcgaataaattgaagctctgatctgcttgggatagttataaaagaccagcagatctggttctatgtctttcaagcttctgataacatggctgtaaaccttgccccatttggtatagaagtcatgcaggacagctgtggcttcttctttgtttgtctgttgatgcacctgtttgaattcgttcatgatcttttcacgatcgtcgacgcgtactttagcgcagatattgcgcatgacatgaaccaaacagcgttgaaaatgagctttaggataagtcctggccaaggctgttttcatgccaacaacaccatcagaaagaaaaagctcaacttgctttaagcctcgggatttcatgttttgaagcatatctgtccagacttcaatgttctcgctaggtgcaatgcagtagtcaatgacctccttgtgcccattaggcttgatgccaatggcaatatagactgcttcacgctcaaatgtttctcggcgcaaaggaaggtatgtcgcatccaaatagacgcagaaaaacttgtcgcttagcttgcgtttgtggtaagcctcaacctttggaatcatctgcttggaaatatttgatacctgagctggactgtaatggctgccatacatcttttcaattagatcggctatttccctggtggtcacgagtaaagcttgataatcatgctttccaagatatccgagtgctgcttgtagtcaggcagcgtgtgctgatgaaattgaccgttgcgatcccgaggcacttgcacttcaattgggccaaattgcgtatcaactttgcggaaataagcaccatttctagagttgccagtattccagccatttctggcataggaatcatagcccagaaaggcagtcaattcagcttctaacaagttattaacagcctgttgtagctctttgcgcaataaatcatttattttgtctggattgaatagagcttgagcaaaatctttggtaaaatcattcatgaaggagttcttctttctgtatgtgtttttttgttcaaaccaatcatacgagaaaggaactcctttttctaatgtttaaagaaataaatttaaggaatcattcatccttacacaaactattttacagtctcatataggagcaaaatatgaatccagatttacttgcggcacttattcttgaaggtcaaaaaaatattaaaagtattgctatcattcctcgtgattatcattttgaagatagtttgaattatgtgttagtaggcttgcggcgggctggcaaatcaacgttattatttaaaagagcacaggatttagtagataaacaaaatgtggattggtcacaaattgtttacttgaattttgaagatgaacgactagatggttttcaattagctgattgtaataatatcttaattgcagccaatcaattaacaactaagaagcattattttttatttgatgaaattcaaaatattgctggctgggaaaaatttgctcgtcgtttagcagatcaaggtgaaagtgtttatttaaccggtagtaactctaaggtgttgggtcatgatattgttctgcggctgggtggaagatatatgaccaaatatgtggcaccttttagttttacagaatatttaactgctaaaaaaattccacatgataaattatccgtcttggatacagttaataatggccaaattcgtgctgccgcaaatgaatatctatgttatggtgggttgccagaatctattatcttaacagacaagagaaattacttaacaagtatttatcaaaatgtatttttagctgatatcattgttcgcaataagattcgtaatgaaaagacgatttcattattacttagaaaaattgccgatacagtaatgcacaaagtttcatatgcaactttgtataaaaatataaaaaatgtgattagtacggtaagtcgcaattcgattattgattatatcgattacgctaaggatgcatatttgttattttccaccaaaaattattttgctaaatttagtgagcgtgaaagcagcccaaagtattattttacagataatggcattttaaatttgttttatctggataaattgccagcattactagaaaatctagttgcgatcaagttgcataataaatatcaagagaatttattttatttaaaatctcaaaagacagggatagatattgatttttatacgcgtggtgctagttaaatcgttctagacaataagccaaattataagctaaaattgcaatttccaaccggctttgaaagcctatcagactacgtgctcgattgttctcggcattgtaataggtcagaagcgaaaagtcgctttcaattgttctgcgaatagccatcaattgatgatcattgtgctttttagctcctgtcatatttttacgatatggtgtccaaagttcgtaacccatttgttttagctgttgatgcagttctttgcctaaatagccttcgtcgccaagaagatagtaattagatggatgggtattttctatcagttcaactgtctccctggcatcatgaactgatgcttttgttacgacataatcaagaatgtaaccgtcatcgctaacaatggcatgaactttgaaaccatagaagtaaattttcttggtggccttataaccaatgttggcataaccgcgaaaaattttagcacgatagtttcgaattggttggcaaacaggtaccggaaagctgtcaatgatcaagaactgtccattcaggtcaacctttttattcatttcttgccgtatctgataaatcaattgcaatagctgacgtgaacgccgattaaaacgtgagtgtgataaacaattgaaacattcacagaatcttctttgtgattcaattcctgtcttagcttgccagataagtaaagccaaaatcagactgtccgtagttttaatttgatcaatatttcgccgatgagtaaactcagccggtgcatacaaacgataccagtgccgacaaattatcactaaatctttaaaactaacttgtaaatggtggctaaaacgcttaagcttaaggcagttcaatcagatcagactcttttctattattactatttacaagtcgagtctaacaagattggacttttttattaactaaaacgatttaactagcaccacgcgtatttttatgtaccagctagtaaaactgcaattcaagttgcatgggaagtaaatgatacgtcaaaagaacgtgaagttgggaacctaattaaattagctgataattttgatgaagttgaaaacttaataatcgttactcatggtgaagaggctgaaattcagcaaaaagataagataattcagttaatgccactatataaatttttattaatgagatagtttttcgataactcataaaatggtaatgctcaaaattttttgagcattttttataactataagatataaagagatataaaaatggacataagatctaaagagatataaaattaaagccaacaactaaaataatgaaaataggtgaacatcaattatgtctgaaataacgaatccatttgaccctaactttggcaaagttcccaaaatatatttggggcgacaaaaaatagtagaagatatagtaagatcacttgaaagtggcaccggaccctatcaaacttcaatgatctatgggatgcgcggggttggtaaaacttcattacttgctgatattacctcaactttagaacaaaaagataactggattgttatttacttagccatgacaaatgatttgcttgccacgctcatccaaagtatttatcaagaagcagcgaatccagtaaaaaaggcgttgaacaaaattgatggtgtaaagttttcggcttttggctttgaattggaagttcatatatcaaatcctcaatctacttatcaagtgttacttgaagaaatgttaaaagttttaaaaaagcatcaccaatctttattgatagcaatagatgaggttaaagaaactcctgagattgttaatttggcgtctatctatcaaattatggtgttaaaaaagtattcaattaatatgatgatgactgggctgcctaagaatgtttctgaactccaaaataatgatgtattaacatttcttttaagaagcggtcgtgtaccattaggaccacttgatcttttcgatattaagtatcggtatcaaaaagcatttgaaagaggtaataaagagattaataatactgccttaatgaaaatgactaagctgactagaggttacgcttatgcatttcaagacttgggatatcatgtttggcaacattctactgatcaggtaacagatgaaagtattgaaaattcgatctcatcgtttaaaaatgatctgtttcgtaatgcttatatcaagattatctctgaattatcgccagtcgatcgaaaatttttattcatcatggctcataatgataaaaatgttgttaatataagtgatattcgcaagcaaatgggaaaaagttctaattatatttcgcaatatcggcagcgattaatggatagtcaggtaatcattgatgcaggatatggcaaagtggcattttctctgccattcatgaaagactttttgttagaagcagaagaattatatgaaattgataactaacgaagaaagttgctctcaaaaatagagcaactttttatttgataattagactcttcgcttttgtccaccaaatgtgtaaacaataagcagaggtaaatgataagatccaggttaacagccagattccaaagaaagttaagaatgggtggtaaatggcgtgatattgcatgttaagaccgcgccaaactaattgattccagaagacattggataaatatgcgcgataagcataagtagccaagaaatggaatacttttaaactggtttgcgaattttttctaacttgatgcaggcaaaaagctgaaatcagtgcaattactgctaaacaatagagagtcattgacggcttgtaatatggtgcattattgaagttgattggataaccgaacttgtgcaactcaacattagtccaaatgaagcaagcaataaataatatggtaattacccaccaaaacttagtgaccagctggttgtaataaccacgcaattgccatgctaagacgccatacacaccatagatgaagaatgaaataaaaatgcggtcgagtaaataccaatcatgttcatgcatgccgtgaaagacgttgtaatcatagaaccaaagccaggcaaaatagagtacgaaagtgattactgcaatccaaatgcctcgagttagattgtgtcctacatagcggcttaatccccagaagattggcatcaaaataataaactgcaacatcatcgtgttgtaccacaagtgcggggcggcattaccattaatgaattgccaatagaatgaaccaatattgttaaaatgattaacttgttgcaaccagggcatccctaatagataaatgagcgtccaccaaatagtaggtacaaaaagattagaccaatttgtctgcatatgttttgcataagaaaaactatttttttcattattagtacggattgtggtatacaaaataccaaaaataaaggctggagccgtatatttgactaaattataaaaaacgccaaaaacatcttgtgtgtgaaccggttgttctacgtccatgaccagcgacataattggctgtgagattactgcgctgcaggcgaatacttttaaataatcgccaatatcagctatttgatagcttttaaattgatctgttttcatgaacttgctctcttcttttcctaatattattgtgtcatttttttaaattaggcgaaaggataatcatgttaaaattagtttagctattttggaaatggggtcaaaatgtcagtagaaaagatcacacaaaacgcactaaaagcattgctttatgaagtagttaccaatcctaagccaggtttagtggatccagttgacgtggggtctcatcctgatatgaatgtgtatttgtttattaatagcagtttgagtttagaaaattattttcggcaagcagctaaaattggagcagattttacggggcaggatttgcggcaaatgtttgaacaattgcgtcaagctggcattgaggcagaaaaagcaatgtttaagacaacgcataatataaatacccataaaggcgcgattttttcgttagggttgtttggctgtgcaagtagctattgtgaaaataataatcaaggtgaatttgaagtgatccagcagatgactaagggcttagtaaagcacgatttaggcaagaggaatgagactgctggagaaaaacaatttttgcaatatggtaaaggtggagttagagcagaagcagaagctggttatcctttggtgagggatgtagcactgccatttttagctcaaaccgaaggtgatttgaatgttcgtttactcgatacgttgatgaaaatagttagtgcgattgaagactcgaatttaataaaaagagcgggaaatattgaggttgtttcttgggcacataatcaagcaaaaaaatatttggcattaggtggctacggtactcaagctggtaaacagtttatgttagaactaaatcagatttttaaagagaaaaattatagccttggtggcagtgcagatttattgattattacaatttttatggcgttgcagcgtgggattatttaacgcaaaaattgtctagttaagaactagacagtttttttgctgtgtgtcgggcatggcatttgtctagtctagtgaaagtctagatcacgggtagttgtcgccaagtgtagcgaaccacaagccgttagcggtgacgctatgggtgaaggaagtggctagcgagttttccgagcctacgtacagaaacctggtcaggccaaatggtggatgagactgcagcacaagttaaagtccaaaggacaaccgtaaaaccaagacggtaaaccagggggcagtggaaaattaaagatgaatgtcttaccccgagagatctcgtggacaggtgaaaccgagtaagctttaatatcagcgatcgtaagcctggtcgaaaaaggttaatcgcgagaagtcagctgaggtcgtagtagtgctgaaggttttgtaatgaaactggagcgaagggcctaatgtttgtaagagcatatctcgctataagcaatgttcagacagtccggataagaggatagcctagcacaaagagaacgtaactctttgatggtgaaagcaattgggacaattctgaataaatttacaagtagaaatggagatatcacgagatggaactaattgaacagattttaagtcaaaataatctcaaggaagcaatcaggagagtcaaaatcaataagggagcgcctggtgtagacaggagaacagttgatgagcttgatagctattttaaaaagcatcaagtagaaataaaggacgccatcatgaagatgaagtatcgtccgcaagctgttcgcagagtctacattcctaaagctaatggtaagaaacgtcctttaggaatacccacggttgttgaccgagtaatccagcaggctattgcccaagtattaatgaagatctatgatcctcattttagtgagcatagctatggctttagacctggacgcagtgctcatgacgctattgaacaagtcttggaatatttaaacgaaggctatcaatgggttgttgacctggatattgaaaaatactttgacacggtaaatcatgataaattaatttcaataattagagagcaagtaaatgacaaaaccaccctccatttaattcgagcctttcttaaagctggagtaatggaagatggttgggttaagcctaataaactaggtgtaccacaaggcggccctctttcaccaattctatccaatatctatttagataaaatggataaagaattggaacaaagaggcctgcgctttgtccgctatgccgatgactgcaatatctttgtcaaaagcggtaaatcagccaaacgtgtgatgaattcaatttcatcatggctagaaagaaagctattcctaaaggtcaacgcaaccaaaaccaaagttgtacgaccaaccaagagcaactttcttggctttaccttctggaaaagtggcgaatactggcaagcaaagccaggagatgaccgcaaaatcaagctttatgacaagatgagagaacttctctgtcgcagaaaagcagctgctcagcctctatcactagtctttactaagataaatcaagtagttagaggctgggtcaattactttagagttggcgacatgaaatattttctaattaagttcagtcaatggctgcgtcataaagtacgggtggtaatcattaaacaatggaaactaccaaaacgaatatacattaacttaatgcggattaacaaggcactaaagtgcaattttagtgatgaagatattcataaagtagctaatacgcgcttaggttggtataaaagaagtacgggttatgtcattaactttctgcttagcccaaaagtattgggcataagcaaagcggatcgcccaggcttggtcgatccgctagaatattatttatctcgtaaataatcacaaacgtagcgccggatacggaaccgtacgtccggtgcaatgagaggggcgagttataaaactccctctactctattttagatttaaagagatttaaaatgaaaaatcctgttaatccgacttttggagatataccacaaattttttttaaaagataattcggataatgaaactaaaaatgtagattcaattttctatttaggtttagataccgagtattgaaaaagcattaagctattgcagatagcttaatgctttttttactatttgattagatttcttataatccaaatgcaattttgtataataatgcaccacagattccacctgcaattggtgcaaccactggtacccaactgtaatcccagtgggctgaacctttgtgtggcaaaggacataaagcataaacaattcttggacctagatctctagctggattcaaagctggtccagttggcccaccaactgccataactaaagcagtaattaagaaaccaacaccgatgttagcaatgtcttcagattgcttgaagaacatgccacgatataaaccaactgcgatgaaaagcaaaatagcagtgccaaagaattcggtaataaaaccgttgaacttactgttagccgaatcaccagtcgcaaaactggcaaaaacagcatcatcactagtggttctgccaatgtaaggccagtagacggctactaagattagttgtcccacgatggcaccaagcatttgtaccaagatgtaaggcattacttgatcccatgggaagacgcctgaacaagcctgagctaaggtaacagcagggtttaagtggttccctgaaattgaaccaaagagcatggctgggagcattactccaaacccaaaaccgaaggcgatcaagagccacccaccattggcttgaccgtcacggctattaccaccggtatcacgtagtacagaattggcaactgatccgttacctaaaacaactaaaataatcgtaccgaaaaattcggcaaaatacttcattaaccaagtatgttccataatagatactttcttctcctctagtagaaaaaataagtgaaaaatagtacaaccacaaattatactcttaactcgaaaaatagatatagttttttgtaaaaaagcaagaaaatagcattaaaaaacactaacttttaaatagttttaaattaattaaaaagatttactatttggctgcaatcatcacaattttctaattatccagcaactcaataaattagaccgttccaaatatgaacattatttaacaagccctagataatgccaaatctacttttgacaaataaatgcataatcattatattaatttcacaaatttggtatatagctttatatatacttaatatataactttaagcgctttcaaaatattgtggtactatacagttattcacaattaatatgcataaaaggaaagagagtagcagttaatgagaacaatatatttggtgcgacatgggcaaactttgttcaatgtgcatcataaaatacaaggtacttgtgattctcctctgacggaattagggagagcgcaggcgacagcggtgcggcagtattttttgcaaaaagaaattagttttgatgccgcattttgctcaaagcaggaaagggcaagcgatactttagaaattataactgataatcaattgtcttatacgcgactgcgtgacctgcatgaaaaatctcatggtgaatatgaaggacaagatgaattcatgttgccatggcgacgtggctttagccgtattaatgccgcaatggagccggatcaacatgttgaagaaagaatggaacgagcgatcactaaaatcattgattcaacccatgccaacgatacaattttgattgttggacatgggacggcttaaaggttatttacgcagcgagtaaatccaacttttaaagaatatgataattgcgggatagtaaaaatgtctgctgttgataataacttgaaatatttaagttatgtagcacccgctaaagatgtggttttaaataaagcagctaaaaacgaaatgttagttgtgcgttaacgaaaagagaacaagcatgaatagagataattatattttgtggtttgatcaattgcattgcgatgatgttgatttagtcggtggtaagtcatcctcattaggtgagctgacttctgaaacgaatgtcccggttccgtatggttttgcgactactgccatagcttatcgccactttatgaattattctgatttaaatccaaaaattgataaattattggccactttaactgatccagaagattctgagcaattgcatcgaatttgcaccaaaattagaaaattaattatagaagcgccgatgccaaatgatttagccttagaaattagctgtgcttacgatagcttagcccaaaagatgcaccaaaatgagccattcgttgctgtacgttctagtgcaactgccgaagacctgcctgatgctagttttgctggcgaacaagatacttatttaaatattcatggtcgtgagaatgttttgaaaaaggtgcaagaatgttacgcttctcttttcaccgaccgggcaacttattaccgaattaaacaaaactttccacaagaaaaagttgctttatcagctgcgattcaaatgatggccttttctaaagcagctggtgtgatgtttacagtcaatgtagcaactggtgatgacactaaggttatgattgaggcctcttggggactaggcgaatacgtggtgtctggaactgttacacctgataactatgtagttgataaaaatacgatgaagattgtacacaaaatggtgactaaaaagccaattgagttgatcagattgccatcgggaggaacaattgaacaaaaggtagcaccagatcaagtgaatgagcctgctttgactgatgcacaaatcattgaattagctggttatgctaaagaaattgaaaaacattatggctgctacatggatatggagtggtcacttgatcaaaatgataagttgtggttagttcaagcacgcccagaaactgtttggtcacaaaagaaaaagcaggagaaaaccgatgcaccacaagaagcaactacagaacaccgagtattgttaaaaggcttgccagcttcacctggttttgtctcaggcaaggtacatattattgatgatccaaaagatatcaatgaatttaagcagggcgaggttttggtcactctaatgacgtcgcctgattgggtgccagcaatgaaaaaggcggccgcaattattaccaataatggtggaatgacctgtcatgctgcaattgtatcacgtgaaatgcagataccttgtttagttggaacaactagccgtggacaagctgctacgaaaactttgaaaaacggcgagactgtcaccgtcgatgctaaaaatggtgtggtttatgctggagttgttaaagacgcggttaaaaaagtcgatgaaaagccagctgagcctgctgcagttgaatatttcccaccaactgcaaccagagttatgatgaacttaggagatcctgatcttgctgaaaaatatgcatctttgccagctgatgggattggtttaatgcgcgaagaatttttatggacgacttatattcaccagcatcccctttatttgattgaaactggtcatccagagagggtagttaacgagctagctaatggaatcggtaaagtcgcgcgggcaatggcaccacggccagtagttttacgtttttcagactttaagtctggcgaatatcgcaacttaaagggcggcgacaaatatgagccgcatgaaccagcagacctattaggctggcgcggtgcttctagatattatgatccaaaatatattaatgcttttaaattggaacttgaagcggtaaaaaaggtgcgcgatgagttcggattaaagaatttacatgtgatgattccattttgccgaacagtggatgaagcgcgcaaagtgacggaaatcatgcggacacaaggtttagttagaagcgcagacttcaaggtttacatgatggctgaaattccagctaatattattttggcggaccagttcaatcaatttattgatggttattcaattggttcaaatgacctaacgatgcttttactggggtgcgatcggaataatgatgtgattgctgatctttttgatgaaagaaatcttgccgtcaaaagggcgattagacacttgataaaggttgctcatcaagatggtaagacggtttcgatttgtggtcaagcaccatcagaatatccagaatttactgaatttttagtcagaagtggcattgattttgtatcagttaaccctgacatggtgaaggcgactaagctaaatgtagctcattatgagcagaggatcctccttgatcatgcaactggcttaggtaaaaaggatccaaatgaatataattgggaaaatttataatttgatgaaaagtctttgattgcagtattgcagtcaaaggcttttttagagttcaattttgtttttgggcaattttacatttaatttagtaaaagagtaaggttgaactaatgaaatttcgtaagcatctaaggctaatctctcactggcaaaatcagggttatataaaggatcgcctacaataggacttcctaaagaggcaaggtgaacgcgaatctggtgtgtacgaccagtttcaagcgtcaatttgacaatcgcagtattgtcatcatttttttgtaaaacttgataatgagtaactgctcttaatccagtaggatcgattttgcgtttgcgttgatcaagtggatcgtgaccaattggggcattaatcgtacctctttcagctaagtgatcagcattgataactttagctaaataatcgcggtgaaaaattttgctggttaattcacgatttaaaataggtacaactgcaggatttttagcaattaaaagtaaaccaccagttaacatatctaatcgatgaacaatatagggactctgaccaagataagtagtacaatcgttcagagcagtattagtttcatttagattagggtgcgttttttgcccttttttcttattaataattaaaagattatcatcttcatagataacatcgggcatcttaccgcttggtgcataagcctgttgatcactttcaacatgatccaagttaatttcaattttatcaccaggtaaaatgttttgattaaaatagcgatagttgccgttaactaaaatattttgttcaattcgcaaaaaatgacgccacttgcgagggattaaaagttgacgtagtacttcattgacagatgccggagcaagattttctgggtaaaaaagtgtaaaatggaaactcataataatttcttaagtctaatctagttataaacacgtgttttgatagtatggtacaattttcttgtttctaaaaaggagcaatatttaatgaataacgaccaaccaagaagaggtggctttaaagatgcttggcatcgatttgatagtcgcttctttatcggacgctggattattttaatcctgctcacattgatgctcttaacttgtacctattatacaattaaagttaagacatcaaacatagctaatttgaaggcctcgctttcaaccacaactacaatctatgactacaagggcaaaaaagcaggttctttatactcgcaaaagggatcatttgtggaatatgaccagatttcgcctaatattcaaaatgccgtaatttcgactgaagatcggactttttggaagaacccaggttttagtattaaaggcatggtgcgagctgctttaagtttagtgattcatcacggtcaagtaactggtggtggttcgaccttaactcagcagttagccaagaactcgcttttgacccagcagcagactttttcaagaaaattggaagaactcttttttgcaattgaaattaaccatgtttactccaaaaaagatattttaacgatgtacttgaataatgcttactttggtaacggagtttggggcgtgcaagatgcaagtcgtcgctattttggcaaaaacgcaagtgaacttaatccgagtgaagccgcaactttagctggaattttacgaaatcctagtttttataatccggttgatcacatgtcaaatgctttagcaagacgaaatttaatcttaaacttgatggtggataataataagttgacagcggctcaagctaaaatgtatcaaaagcaaggattaactttgcggaatacttttcaaaataaaaacggctatcgctatccttacttctttgatgctgtagttgacgaggcaatctctaaatatggcttaactgaagaacaagtcatgaataaggggcttaaaatttatactactttaaatcaaaattatcagggtaaattgcaggatacttttgagcaaagctggcttttcccacaaaatggtagtgatggaactgaaagccaaggcgctagcgtggcaatggacccaagtactggtgctgttcgggcaatcatcggtggtcgcggtaagcacgtcttccggggttacaatcgtgcaacgcagatgaagcggcagccagggtcatcaatcaagccgttggcagtatatgccccagctttacaaaatggctatcactatgactcgcaactatcgaacaagttgcagaaatttggtaaaaatggctatgaaccgcataatgtggataatggctattctaatacaattccaatgtatgaagctttagaacaaagtaaaaatgtgccagctgtttggctattggataagattggtgtaagtaaaggcgtgcaatctgttgaaaactttgaaattaaggtaccaaagagtgaccgtaatttagcgcttgccttaggtggattatcttcaggtgtttcgccaattcagatggcacgtgcatattcagcttttgccaacaagggtaatttgcctaataattctttctttattaccaaaattactgatgcttcgggtaacgttttagccgaaaataataatccaagcagccaccgcgttatttctgaaaatactgctaaagaaatgacgactatgatgctcggcgttttcactaatggtacaggacgctctgctcagccaaatggcttccgtgtagctgggaagactgggtcaactgaagtacctaactcatatggatttggtaccaaggaccagtggatcgtcggttatacgcctgacattgtacttgctacctgggttggttttgaccgcactaacaagcaacactacatgcagggcatttctgaaacaggaattacgcgtttatataaggctgagatggaaggaattttgccgtacaccgcgcaaactgaattcacggagaaggcacctaaccagattgtgaagaataatggttctaatgattactggactaatggattaggtgaaaaaattcaagatggactcggttctgcaggacagaaaatcaatgaatggtataatagctttaaaggcttatttggccaataaaatttaggaggactagatggttaacatttacgatgctgctaacaagttagcagaagatttgactcaaactgatcaatacaagaagttgcaagaagcaattaaagctgttgaagatgataaggatgcttcagctttattcaaaaagatggatgaattgcaaaataagatcatgcaagcacaacaagctggtcaaccactttcagctgaagatcaacaagcttacaaggacttaaatgatcaagttcaaaagaatgataaaattgtttcacttcttacgaatgaacagggtttgtacgatttgcttggtgaagtacaaaaagcttacactaagccaattaatgatctttatgaagatcttagaaattaatattcgcgatgaaatttattcactttgcggatgcgcacttagatagtccatttcgtgggctatcttttttgccatctgaggaatttaaccatatctatcaggcagctgatcagtcgctaaaaagaattatcgacctagcattagctgaaaaagttgatttagttttaatagcaggggatacctttgatagcagtcagccgtcaccacgggctcagttgttttttgctgcgcaagtgaagagattaactgatgcacaaattcaggtagtgatgatttttggtaatcatgaccacatgaagcaagaagatctgctagttagtcccagtccttactttaaattgttaggcaatagtgaaacagtagagcaagctacttttactacggatgcgggttttaactatgacgtaatcggcttttcatatctgaataaccatatcactgaggataaaatcccagaatttccagcaaaaggaaaaaattatacttttggtttaatgcatgctcaagagaaatcagctactgctagtcagaatgtgtatgcaccgtttacagttgatgagttgcaaaacttgaattatgactattttgctttgggtcatattcatgcgagaaataatttaagtagtacgccgtggattgtttatccaggtaacattcaaggtcgccacattaatgagatgggagccaagggatgctatctaggtgagattgatggaaatagtggtaagactactattgattttaaagaaacagggccaattttatggcaagggacaaaaattaatcttgaaggagctatcagtaaagctgacttacaagcaaaaattattgccaagcttgaatctggacaaaaaacgtactttagtttgacgattgctggtgctcaatatttgagtgccgaagaacgcgatttagttcaggatcctgatttttggcaaactatttctcaatcgctgccatttgcttctcagttagttgatgtgcgctttgttgtgaatactagtttaaagttaaatgacaatgaccaacaagccttccaagctgccaaagaagagttatttgcaccagctgaattcaagcaaattgttagtgactggcaaaaaaaggatccagaagctgctaaattagcggctgatccagactttattgcggcggttaagaatctaacagaagtaaaactaatgagtaaattgaaaggaattaaggatgagactgaaacaaattaagattattaactttgggcagttctcgaataaaaccttcgatttgcctagtgatcaaattaatgttttctttggtgccaatgaagctggtaaaagtacaacggtagcttttattaaacagatcttatttggctttcatttgagaagtaactcttcaccgttttttgaagattatacgccgctagctcatgttagtccgatgggcggtaatttagtttttactgcagctgatggtgaatacgaacttgagcgactctatgctaaaggtgacaagactaaaaagggaattttaaccgtcaaaaaagatggtcaagttgtacctgagagtgtattttttgatcagattcaaaatattgatggctctttttacgctgatagttttatttttaaccaagaaatgctgggtcaggttaacagtttaagtcaagaggatttgcttgagcgaatttattacttgggagcagcagattctagcaagttgctggaaatgcgcgacgattttgccaaagaaacgggtaagctttttaaaaagacaggtaaaaagcccgaagtaaaccgtctgcttaaggaaatgactgatcaacgtgataaattagcgcagactaaaaatgagtttaatgattatgaacagctgcaccaagattttgtacaaaaaagagcggcattaaacagacaaaaacaagatctggctgttttacaaaaacaagaacaagatttgcatgatttgcaaaaagaaatgggcaattatcagacgctgcttgatttgcaaaaacaggtcaaggatgtcgactttaatggtcaaaattatcaaaaagcccaagatattatggctcagggacgtaatttgcaaaagacgattcaatcggtagaagcgcagttgcagggcctgggtgaaaacgatcagtctgattttacgctagagaagaagctaatccagcagaagcctcaactcttgcagtggcaagcggaatatcgtaattgtttgcaaaaggctgaccaattgaagcaggagaaagagcaactattagctttgacacctgagttaaaaaatctactcaagttgacaccagagcaaattgaacaaatgcaggcagactatcaagctttgccaggtgctgtcaatgagcctgcttatgtaactactaatgacaagctttggtatgttatcggtgcagtgttagcggcattaggtgtagttcttttggtagcgttgggtacagttggtgtaattgcattaattactggactaattttcctagcagcaggatacttaaaaaatagtaaccaaaataagcaaaatgcggcagtattagaaaagcaaaagctggttgctcaaaaacgccaagctttccaaacaaaatatggattgaatcctgatacgctaaacttaaatagcttactaactaatctgaaccaatatcaaatcaaaaagaatgccgcacagactaataataagcaagtaactgttttgaatcagaatgtggctcaactggcctcaagtgtccaaaatgcattgaagcaaccgattgataatgactttagtcaagttttgaacggtttggacgaacttgagacacaaattagtgaaaaacaagaattgcttcaaagaaaatccagcttaactgcatcactaaagcaggacaagcaagatttgaaagaattgggtctgaaattacaggcactttttgcccaagctaatgtggaaaatatggcaggttacgatcagctttatcaagattcacttaatcaggctaaactgaagacgcagattgcggccttgaaggaatcgttaggcgatgatcttcaacagctgcaaatgcagacaaattcaaccgaattagcagataaattaacggctttgactgaacaaattagtactaagaatgcagaaattaatgaacttcagagtcaagttgctcagttgcaagtgcagttagacaatttagctgattctactgcggtgtttaaggctaagcaggatctggctaatacagaaaccaattttgtccagagcagtaaagaatacttggctaacttgtttgcggcaaggtggatcagtcgctcgcttgacttggcatctaatgaacggttccccaagatgcttaaggcggctcaggaatacttagctttgctaacgggcggcagatatgttgggattaatttagataagaagctaacagtagtcagaagtgatggtaaaaagcgcgaagtaaaatacttgtcacgggggactgctgagcaattatactttgccttgaagttagcttttattgagcagatcaaggatgaaattaatttgccaatcttgattgatgattcgtttgtaaactttgatgatcagcgagtcagctatatcgatcagttattgcaaaagattagcgaaaacaatcaagttttaattttcacagctcaaaagaatttagttgatcagcttgggattgagccattaacttttacgaaaggaacacaggatgcttaagagattgttagattacaacgatggagaagaaatggacattgttgttttgattagaaactcacagttgcgtcataataaaaagaataagttgtttttagcgatgcaattcagtgatggctcaggcgagattcgcggtaattactgggatgctaacaatcaagatgcagcaactttttcaactgggacaatcgttgagttgaatggcaaaagagaagaatatcagggtcgcccccagattaggatctattctctgcgcgtggtcggtccacaagaaggctatgaattagatcaatttattaaatcagcgccggaaccagttaatgagatggaagctgaaattaataaatttgtgatgcagattgataatccgacctggacaaaaattgtgaagtatttacttcaaaaatggcatgatcgtttttatgatcatcctgctggtaaaagcaaccaccatgcggtccgcggaggtttagcttttcatactttatcgatgcttaaggatgccaaaggtttggctgataattatgagcaagtgaatagatcgctactttatgcgggatgtattttgcatgatatgggaaaagtactggaactttcaggttctgccgcaactcaatacacgactgaaggcaatttggttgggcatctggttttaattgatgaacaaattatgctggccgctcaggatatgaagatgaatctggagtcggaagatttactcttattgcggcatatggtgcttagtcaccatggccgctttgaatatggttcacccaaattgccggcattgctagaagcggaattattgcaccgaattgatgatttagatgctgcaatttatgcagtaacgaatgccctgcagcatacgcctaaaggcgagttcaccgagccactactgagtcaagatggcaagcgatattatcgaccgatgcacgattcagcgctagataacgcaaaacatttagaataagaaataagcatcactgcagttgatttgcagggatgcttattttgttgaaaaattgaactagagttttattataatttcatagtataataaatctaatttataggggagtaaaaaggatggatattgctgaaattactaaaatgattgaggcggttaaacaaataatagaaaagaatgattacattgatttgccgctatttcaggaaactgtcaaatcttttgtgtaaatagatttttctcgtagattgattttttaatcttttatttaatcaaagtaggattctaaggtatcctgaacctgaccgaagcctttgtggattcgattgaaatagcgttcgttgtagctcattgcttgaatgccaataaaagtatcaagcgactgttcatttggaaactctgccttaggcttagctttgcgcttgatcacattgttaaatgattcaatcatgttagtcgaataaattgaagctctgatctgcttgggatagttataaaagaccagcagatctggttctatgtctttcaagcttctgataacatggctgtaaaccttgccccatttggtatagaagtcatgcaggacagctgtggcttcttctttgtttgtctgttgatgcacctgtttgaattcgttcatgatcttttcacgatcgtcgacgcgtactttagcgcagatattgcgcatgacatgaaccaaacagcgttgaaaatgagctttaggataagtcctggccaaggctgttttcatgccaacaacaccatcagaaagaaaaagctcaacttgctttaagcctcgggatttcatgttttgaagcatatctgtccagacttcaatgttctcgctaggtgcaatgcagtagtcaatgacctccttgtgcccattaggcttgatgccaatggcaatatagactgcttcacgctcaaatgtttctcggcgcaaaggaaggtatgtcgcatccaaatagacgcagaaaaacttgtcgcttagcttgcgtttgtggtaagcctcaacctttggaatcatctgcttggaaatatttgatacctgagctggactgtaatggctgccatacatcttttcaattagatcggctatttccctggtggtcacgcccttggagtaaagcttgataatcatgctttccaagatatccgagtgctgcttgtagccaggcagcgtgtgctgatgaaattgaccgttgcgatcccggggcacttgcacttcaattgggccaaattgcgtatcaactttgcggaaataagcaccatttctagagttgccagtattccagccatttctggcatagggatcatagcccagaaaggcagtcaattcagcttctaacaagttattaacagcctgttgtagctctttgcgcaataaatcatttattttgtctggattgaatagagcttgagcaaaatctttggtaaaatcattcatgaaggagttcttctttctgtatgtgtttttttgttcaaaccaatcatacgagaaaggaactcctttttctaatgtttaaagaaataaatttaaggaatcattcatccttacacaaactattttacagtctctatttcagaattctagtcaattaaggttaaaaggaaataattataattttatacttgatttgaatagaaaaggacatagacgtcctaaatgtacttttctattaagggaaaagagaaataaggaacagccattagttagagtagatattattggacgtcctcatcaaaatcctgttggagactttaaatggtcaaataaagtcattccttgtcctcatttgcatagagcggattttccaaaatatggtacatatgtagctgtaccacttttggaaaagaatgaaaattttcaattgagtcagaatgatttaaataacttgtgtgaatgcttgaagaagacattaaagtttttgaatgttgataatataaattcatataattttcgagaacaggaaagtttattttaaagaaaggggggagaacagttaaatatgtttgatgtagagaaaatgaagaaaatatattttgactggatagataaaaagattcaatttgtcccttctaaaaatcaggattatatgactatcactacaccttttttagatatgtacaatgattatatagaattagtgattgcacaaggaaatacatcaaaatatataattagtgatgatgggtatactattaatgagttagggttattagatattaatttaaacagaaaatctaaacgtagggactactttcaatcgattttgattaattttggtgtgaaaaatcagaataatgaattagtaattgaatttgatgacttagcccaatttccagatgcacaaaataggttaactcaatgtatgttgcaagcttttgatttattacagacttctaaaaatagtgttattaagtattttaaagaagatgtaacaaattattttattgataataatattccagtaggagaagatttgagtttactaggaaaaagcgtacggaattctaagtttgatattgtggttggacgtacaagaaaaaaaccgcaacaagctattaaggtggtgaatacgcctattaattctaatatagctaaccctttatttagaattattgatgtacgagaaagccaacctaaaacataattttcagttattgcgaacaatattaatagtcctgtttctagtgattttaagtctgcctttaagaactataatattcctgtttattcttggtcagaaagagagcaatggctttccaaatttaaattggcaatgtgatagttgattaaaggtgttgagctgaaattgtaaataatattagttctagcattaggcaatatggaacatttagaataagaaataagcatcactgcggttgatttgcagggatgcttattttgttttggtgaaaaattgtgtcaataattttttgaacaaagttattgacaaattagctgaagaataataacatgtttatacaattgaaaagcagagatgtttttggatagattagagacttgtctcctttctatttttttattgataaaaagttcaagaggtatacattgatttcctcttggacttttttgatgcattgaattgctaaagatgttataaaaattagggtagggaataaaaatgaaagcatcaaaaaaattaattttagtatcggcagctacgataatgttgactgtacctgttttagcaaataatcatttgtctaatccagttgttgccgcaagtcaagataatacacaaactactaaattaacgttctatattaaccacaatgcctatgtttacaatcatcaaggtaagcgtaccaagagcaagattaagaagggaaagttactaaaggtgactatattgaagcctaaggcaattactaacccaaatcaaagcaggtatttcttcaataatgtattagctggcaagtatttttcgttaccgacagtaagcatcaagaagacagactttgttaatattggcaaaaataaatatattaagccaggcaacattggtagaatctcgccaggaaaatatcaatatgcggatctgtcaactaaggaaattaaggtaattaccaaaaagactgctccagtaactaatcaaatagggatgccaattgctgctccaattaagaagggaactaagcttacagttgatcagaactattatcataatgttgacggcgctgatgattatttgagtagtctggaatattatcggattaaaggtactgataagtgggtcaacctacctgatatcaaaaagtcaactcggattatgccaaataattttgcattagctgcatctactgaagataattatgtcattgccggtaactcaacgtatctctataatattgacggtgaaatcgttgataagagttatttattgattacagatgttaatgttggcgttgatcgagctctttatatttggaacaagcaaactaaacaagctgatctatattatcatcttacggctaacaaaaaattggtctgggttccagctcttgatggaacaggcaagactggtactacgattaccagcaacggctcatatgctcaccaaactaaagatacagcaaatacttttgttaaagctagtgatgtgacaagtcaaaatccagttgcattaaaagttgataatacaccgagcgaagcacaagcagatgcaactcaggccactgctagtgactatggtgagttgcaagccttagttgatcgagcaggtcaaattaaaaaatcgactttatatcgtttgactgaaaaagcacagcaagaaagatatgatttggccgttgataacgcacaaaagttattgactaacaagaatacttctattgcggcagttaagcaggctagttggcaaattaaatacgatcaaagtaaattagacggacaaaaagtttgggttaaaaacatgaataaactaactaaggcagaaaagtcttgggtagtttcattggctaattgtgatatccatggtgatttacaaaaagaatatgctggcttttataaaggtaaaattgcggtagtgacttataataaaaagactttcaagagtgaacttgtacgctacttgaagttgtctgattatgctactgataaataaaattaaagagctcaagaatgctttaatgatgaagcatcttgagccttttgatttttagtaaaaaaatatccaagactgaaatcttggatactcattggagctggaactgtgcttgatgaggcaactgctagaatggcgattgtttcaggagctagattcgttgttagcccatcttttaacgaaaatactgctaaggaatgcaatctgtatgcggttccttacatgcccggttgctttagtccaacggaaattcaatctgctttaacttatggtgctgacgtagtcaaaatcttcccaggttcaattgctggtaaaggcattatttctgaaattcatggacctttcccatatgttaatgtaatgccaagtggtggtgtatcattaggaaatatgcatgaatggtttgctagtggtgcctatgttgttggcgtaggtggcggattagttggacctgctaaaaatgatgattataaagctgtattgcataatgctcaagcttttcataatgaatttcaaagtattatttatgccaactcagctgttactaggaaggtgccagtgaaggcatagtttttttggggggaatatgacgcccccctatttaaaaaataaattaatgaaataaaaaaacgtcgaatccattcagattcggcgtttttgattaactaaatatatttgttacttagtagttgaaacgtatgatgataatacatccttcaagtcgctatccttgattgaaacgtcagccttcttcaaaacagtagcaataacgtctttcatagtagcttggtcttgagccattgatgcgtaaatttgatcatcaatagccttcttgtggtcagcaaacttacccttagctgggtggctgatcatcttaattacgtggtatccagattgtgacttaactggagttgaagtaacttcaccagtcttaagcttgaaggcagcggtcttgaatgagctgtctaaagtagtgtcagttgagtcgaatgatggcaacttaccagccttgttcttagtagcagtatcaagtgagtacttcttagctaaaaccttgaagctcttgccatctttcaattgcttgatgatgctttgagcagttgacttcttagcaaccaagatgtgttgaacagttaccttaggttggtagctcttccaagcttgttgttcttgcttcttagtaactttcttaatgtgcttcaatgcttgttcagaaagaaggttagtcttaatgttttgcttgaagcttgaagcagtcataccgttttgttgtaaaacagcactaaattgtgagccgtattgcttcttgtagttgttgtattgcttgtcgactttcttttgagatacgtacttgccgtattgttgttccaaagcgcgattgatgatcatgttagccaaagttgacttaccggcttgtgacttcttcatttcatcatagtattgttcttgagtaatcttgccacccttgtatgaagcaacagtagctttagtgccgctattagaacaagcagcagttgataatgcaacgccagctacagctacgactgcagcaatttttttcatataactcttcataaaaataatatctccacatccttaaataagtaactgttcattaatataccataaaaaagggcgtttcgttttcaaattacgaattttcacagaaaaatcaaattttctttattttttcttagttctttgtgtcttgtgagttagtatctggcacgatgttttccaaatcttggttcaatttatcgctctttttttctatgcggttaacgataggttgaatatggtcggaataatgttcaacactatcattaatatcactaattgtacgttcagctgttggcatttgttcatttaattcttgactagcctttttagctttttgcaaggcagaattaaagcgttggctttcatgtttaattgcttcgaactcatcttttaatggcttgcctgggcgattaccattgctatctttcatacaggaaaaaactagcccagctgttgcaccaaaaactgtgcctaataagaaatgtttcatttttaacctctaaaattgtgccttaattttgttagcaacttcgttgtatttagcttcatcgtatttgtcagcgttgttgcgggtcatcagcttcaagccatcgccttcaaaacgaggaatgaagtgaatgtgtgagtgcataactacttgatttgcggccttaccattattagtagtaatgttcattgcagtaacattagggaaggctgccttaattgcattagcaatttcaggaatatattgtaaatagcgttgtgcgtcttccttggtgtagtcaaacaagttaacgatgtgcttttttggcaccattaaggtgtggcctgggttaacttgagaaatatctaagaaggccttaacatcgtcattttcaaaaacggtatagctaggaatttcaccgcggataattttgcagaataaacaatctttgtctaaattttccataataaaacctcatatccttgtactttagtttactattaaatccatgctatcataataaaggtataaattcagtaaagaaagataggaaaaatgacattaaaaattgaacatttaacgggaggctacacgggtgtcccggttattaaagatattaatttggaaattaagccgggtgaggcactaggcttgattgggctaaacggcgcggggaagtcaactacgattaaacatattttgggtttacttcgcccgcaaaagggtaagatcagcttgaacgatgttgtattgacgcggcaaccaactaagtttaagcgtgaagtagcttatattccagaaacaccgattttgtatccggaattgactttaaaggaacatttggagctaaccatgttgagttaccacttggatgaaaataaagcatggaaacgcgcacatgagctgcttaagatgttcagacttgatgacaagctagaatggctgccgattcacttctctaaggggatgcgccagaaagtaatgattgtctctgcctttttagcagatactagtttgcttgtaattgatgaaccatttactggccttgatcctttggcagttgctaacttaatcgatttaataaaaaaagcaattgctgacaaaaagatggtcttaatgactactcacgttttagctgatgcacagcaagcgatttcgaattatgctgtgttaaaccgcggcacgatcgaagttgtggggagtttgcaagaaattcgtcagcactatggccttaagccagatgatccttttgacaagttataccttgctttgaatagagaggataatggcaatgcgtgagttagcgaatagaaggttgagcgagaatcttaaacaatcagtaaaatatttgacgctggtgtttaatgacttctttattttagcgttgatctttttgtttggggcgctgatgttctggtatgcccaagctatgcgcgtaattcccaataatctgtggttctataagccacttgtcggctttatcatgtggttgccattattagctggtcgattagttaccttattaaaagaggccgacatgcaatttctgtttacgcaagatgaacaaatgggtgaatatctgaagccgatgattcgttacagtatggtgctgccaacaattctgattgttttgcttgtcggaattctgtttccgtttgcgacggtaaaggctggaatcccagtttggtcatatgtaatcctgattatcagcactgttttattaaaattgtgtatgttgctgattgaaaaagagagtttgtacttctactacaattatccgcaatggatattattagtggtaactctggcggctttgttgattggctcactaggatcatttatttatccaattgaagttgtagtattaatggtaattacgcattttggtactaaaaaagaaaagggcgtctttaactggcgctatgcgattaaaactgaacaagctagaaaagatcgcgtttattcaatcttcagtatgtttaccgatgtggcagaaaagcaagttacaatcaaacgcagaagatacctcgactttcttttaccaaaatcattggctaaggaaaatcctaatttgttcttgtatcggagatcacttttgcgtaatccagaatacttgaacttattagtcagaatgactgtctttgcaatcttggtatcgtggttagtgcaagattggcgttgggcactaggcctttcatgcttggtaatctttttaacggtctatcaattattgccaatggcaacagaatttgaccgcaacttcatgtaccgcgtttacccaattgaacggcaaaatcgtggcagggacttggtaaaggtgttgacaatgggcttgtttattcaatggctcttgattagtgtctgctggttaattgtgctaccaattaatgttaacttgtttgaagcgatggcaattttacttggtttcactatgattgtaactgccacttacttgccaggcagagttaaaaaaatgaatcaaaaaaattttggaattagataggaatagagaatgagattaagaaataaaccttgggctgttaagcttgtaaacgaccatccagaaagtgttttgcaaaatcctgatcctgaaaaaaagatcgactggactgaacgatttggtaatgatcatcccatcgaaattgaagtaggttctggtaagggacatttcattactacgttagctgaacaaaatcctgataaaaattatgtcgcattagaattgcaaactacggctgcggggattatcttgcgaacaaagttggaaaagggcttggataatttacaaatcttacgcggggatgcggctgacatcaactgcttctttccagcaaatagcaccaatgttatctacttgaattttagcgatccatggccaaagactcgtcatgaaaagcgtcgtttgacttacaagagttttttgagcaagtatgaacaagttctgaagccagaaggacatattgaatttaaaaccgacaatgcgggcttgtatgcttactctgttcagagcttgaataattatggaatgaagtttgattttgtttcagttgatcttcatcatgaaaagccagagattgtggaaaagaatattgaaacagaatacgagcataaatttgcagctaagggtaatccaatttatgctttgcacgctcattttgaggatgaatagtttgaagcgtctagagttacagcagataaactctaggcgttttttaatgctttattggataaaatcttgctactagctcatcgctttagttattttgttttagaatagaactgtaagatttcagattattggagggaaaattatggaagatacgcgtggtgctagttaaatcgttctagacaataagccaaattataagctaaaattgcaatttccaaccggctttgaaagcctatcagactacgtgctcgattgttctcggcattgtaataggtcagaagcgaaaagtcgctttcaattgttctgcgaatagccatcaattgatgatcattgtgctttttagctcctgtcatatttttacgatatggtgtccaaagttcgtaacccatttgttttagctgttgatgcagttctttgcctaaatagccttcgtcgccaagaagatagtaattagatggatgggtattttctatcagttcaactgtctccctggcatcatgaactgatgcctttgttacgacataatcaagaatgtaaccgtcatcgctaacaatggcatgaactttgaaaccatagaagtaaattttcttggtggccttataaccaatgttggcataaccgcgaaaaattttagcacgatagtttcgaattggttggcaaacaggtaccggaaagctgtcaatgatcaagaactgtccattcaggtcaacctttttattcatttcttgccgtatctgataaatcaattgcaatagctgacgtgaacgccgattaaaacgtgagtgtgataaacaattgaaacattcacagaatcttctttgtgattcaattcctgtcttagcttgccagataagtaaagccaaaatcagactgtccgtagttttaatttgatcaatatttcgccgatgagtaaactcagccggtgcatacaaacgataccagtgccgacaaattatcactaaatctttaaaactaacttgtaaatggtggctaaaacgcttaagcttaaggcagttcaatcagatcagactcttttctattattactatttacaagtcgagtctaacaagattggacttttttattaactaaaacgatttaactagcaccacgcgtatggaagataaaccttattatgaacaagaatatcacgaacctaaaactgatattcctagaccaacttttggacaagcattcaaacttttgtttactgcaccatttaagtagaatgcacgtagtactcgtcgtggattttggtatgcctatgtttgggcaattattttgctagtcattttagcagcatgttcagctacggcatattcaattgatggcattgcttattaaagtaatgaattcttcttattaacgcacgtttcaactggtacacttattattcaaataattatctatctactgattatttggatcttattgggcttacttggctttaccataagaagattgcatgatactgaccacaccggttggtggtactggatctcggttattccatttggttatttgtttttactttacttcatggttttgccaactgttgaaaaaccagttcgttggggcagttatctatttaaagaaaagaaataattgtaagactcaatttctagctttttagttaaagaatggttataataatatcaacttataaaaagtaagaaatgcatgaggtgtgaaaaatggaaaagattaaagaattaactgaagatcaattaaaggaaattactaaagaaggacgtactgtgcttgaattctcagctgattggtgcccagactgcaagtttcttgctccatttatgcctgaaattgaaaaagatttttctgatgcaaaattctacgaaattgaccgcgacggttcaattgacatagcaaaaaaattaatgattatgggaattccttcatttgttgtctaccaagatggcaaagaaattggtagactagtaaataaggaccgtaaaactaaagatgaagtggaaaactttttacgatcacttgactaatagaggagaataaaaaagcatgattactagtactaataaagaagcttatcctaacactttgatcgttatcttaggtcacgatgaaggccgtagctcatttgaggaaaaagaagacgttactcgcgtaactaacgatgaaggcaagaccattggttacaacttcttcaacgttgataagttagttgactttgataagttaccaaatggtccagttaagttgtcagacgatgagcttgttgcactgaacaagaagcttgatgaagttggttttactgacaagttagcatatggcaagccaactttagtttatggctacgttaagacttgtgaaccacaccctgattcagatcacttgcacgtaactactgttgaggttgctgatggtgaagaaccccaaatcgtttgtggtgcaccaaatatcgctcaaggtcaaaaagtagttgttgcacttccaggtactttaatgccaaatggtgcacaaatttggccaggtgaattgcgcggtgttgattcatacggcatgatttgttcagctcgtgaattaggtttgccacacgcaccacaaaagcgcgggatcatggttgttcctgatagcttcgaagttggtgcagaatttgaaccaactaagtgtgatgaattgattgctagtggtgaaattactttataattttaaataaattagaaaaactccttagttacgaaaactagggagttttttggttagctctgccacaatttaccatctggagcaaggttgaatgagccaagtttttttgatattaatttattgctaagatctttgctacaagtatagtaaacgtatttaatgaaatcgccattgtcgttatagcgttcttcataatcactcaaatatagctgatgatttttcatgaacagtggaatctgatcttcagtataggtgattgcaaatttgtctggaaaataccctttaactgtgcagcctttggtatctgtcccttgatcgttatcactgactaattgcacactgtcgtcgctggaaattaaacgtaaattatgcaaattaacagcatttaacgaacaagtgaaaataacttttgcttctttttctggttgatatttaaaaatatgcaattcatttgatttagtatttacttgagtaaaatagaaaaagccatcattaaaaattggttcgccgtagcacacgttaggttggactgaaaatggtgaaaaagccttactggtcttttgatcaaagaagattaagcgattaccaggataaatgcgagtttgccaataatcgtcacgcagatcttcaaattgtacataatcagaaatcgttacccaatattgatcttgaccggctaatggtctttgatcacaccaataaggcaagatgaaactatcattaactttttgccatttatcattagagagcaaaatgatatttccttgcatgtcgcttagaatattatcatcgaagtccttgatgataattcgatcagggacatgttcatagtcattatctgaataaaaatcgctatcttgttcaaaatagagtttagtgtcattaatgaagagcaaagtttgatctggttcgttaactactgaagatttttgtgggtaataaaagtcgatgttatcatcaaaagaagcaatccagacgtgtgccttatcgtaaaccaatgataaattataagtgtgtaaaccagtaagtggcatttgatggatgatttcaggttcttgtccaggtaaatacttaaataaggttagttgatcttgtttaagtaatgcatgtagaaaatagaaataaccatattgatagatcacgctaaagaaaaattgattttctttacttgaaattggttcaaatttttgtccagtttgaaagtcaaagaagactaactgattgcctggaaagggatgcttttgccagtatttttcagtagttaaatcgtaaatatcgattgcactatcctgacaatcgacaccgtagcgtgattgtccttgaatgattgttaaatcattgccggttacaggagaaaatttatcgaatttcattgatgcgtacctttctgtaatttttcaaaattatatcacagaaacaatggtaaaatagttaacgaataaaaacgttgaaatttcgagggacaaataatgttagataaaaataaacaaatttggttcattggtatcaaaggtacagggatggcatcccttgccttgcttttacatgacttaggttatgacgtagcaggtagcgatattgaaaaatacacctttactcaagtgccacttgaaaaggtagggattgatgtcaaaaactttaacccagataacatcaagagtaacgaagaacaagtaattgttaagggaaatgcctttaaagaagataacccagaagttaaagcttgtttggacaaagatgtcaaatggcaatcttacccagatactgttgaagaaattgtccaaatgcatacttcaattggtatttcaggaactcatggcaagacttcaactactagtctcttatcacatgtattaggtgaagttgccccaacttcttacttaatcggcgatggtcgcggcaaaggtgtggcagattcgcgtttctttgtttatgaagccgatgaatatcgtcgtcactttttggcatatcatccagattaccaaatcatgactaatattgactttgatcatccagattactttaaagaccaagctgattacaccagtgcttttcaatcagcagctgatcaaactaagaaggcgctctttgtttggggcgatgacaaacgtttgcaaagtttgaagactgacattcctaagtacacttatggcttcaaggataccgatgacttccaagcagttgacattaagaagtccactactggttctaagttccatgttttagcacatggtaaagatttaggtgaatttgaaattcacttatttggtgatcacagcatcttgaactcaactgctgttattgcggttgcttacactgaaaaagtgccgatggatgacattcgtgaagggatgttgacctttaagggtgctaagcggagatttagtgaaaaagactttggcgatattgcagtaatcgatgattatgctcaccacccaaccgaaatgcgtgcaactattcaagctgctcgtcaaaagttcccagataaaaagttggttgttgttttccaaccacatactttctcaagaactaagaagtatcaaaaagacttcgaagaaatcttgcgtgacgttgataaagcttacgtaactccaatctatgcttcagctcgtgaagctaacggtgatatttcaagtgaagacttggttaagaatattcctggctcagaagtaattgacttagacaatattgctgacttgactaagaataagaattcagtcattgtctttatgggtgcaggtgatattcctaaatatgaagatgcttttgaaaagttgctttaattgaaagataagcatgaaaaaaactgttctcaataagagagcagtttttattttggctaatctttgattttatctttaagatccagactcttttcgtaaatgaagtaaccaatgatacaagtgattacatcactgactgcttgagcccaaacaataccatgataaccaaatacatctttcatgatttctagtgcgatgaaatagacaacgccttggcgaacgatggccatgataaacgctgcccatgcattaccaactgattggaagacggtagtgtaaactaaaatgataccaacgattggtgtggtaataatagtggcaattaacatataactaccagcgttgatgatatctggttgattcataaatagagcggtgactggacgagcaaataaaattaataatccgcctgaaattacagcataaacaatttgcacaagaatatcgaagtttagaattttctttaatcgtttccagtttttagcaccatagttgtaaccaattaaaggttgtgaaccaaaggcaaaaccaacgattaccaagataacgatactgtaaatcttttgggtgattcccattgcggcaactttgtttgcaccgtatagggctaaagatgagttaagaagtgccataccaaagctttgagcgaagttggtgattgaaccggggatgccgattgctacgatatctttgattgttttgccgctaattttgctatattttagctttaatttgatgtagtcagttttgtataaaacgtagtaaatgagaatagcatcagtgactagataacctgtaacgttggcaatcccaacaccgattgcacccattttgaaaacaaacaagaaaataggatcaaggatgatagctaaaatggttcccgtcattgtagcaaccattgcttgggtagctaaaccttctgttctgattaagttctgcggaatgattgagaagataattggcgcagcaccaattgatattacacgataaaaatcggcagcatcttgataggtggcagcttttgctcctaaaagatgaaggatcggattttccaaaattagtaaaatggctgttagtattaaaccagtaacaaatccaccgatcatacaaaaactgcttacacgtttacttaattgataatttctttcaccgaatagccgtgaaattagtgaagatccaccgagcccaaaaatgtcagaaacagcgattaaaaaagtaaaaagtggagcaccaatcgtaattcctgctactagatttgtatcacccgttttagcaacaaacatcgtgtctgccaagttgtagatcatggtagtgatcatccctaagacgaccggtaatgctagcttaaagtagacctttttaatcggcgctttagcaaataattcatccataaattttcccccacattgaaaaaagcgacctagaaagatactttgaggtaaacctcactattctaggtcgctacgttatatcatttatttaattttagcatattgtgttaatttgtgaggtgattatctaaattaaagttaccttgaaattcatcagtagtgctttcttgatccataccatattcagcatcgtcgccccagtaaatgtattgtgaatttttgcccttggtaccggcaattctgaagtaaagtgcagcgctgtcgcctttaccagtggtcttggtggcatctaccttaactttttgaccaatcttgagcaacttgctagttgacttgagcttattatttaaaacgtggatcttgtttaaaatagtggctgtagtggtgctagaagcttggtaaagagtgttgccgttaacaaaaccaacatttgaagcataaatataagcaccgttgcctaaagcagaaaatggcttgcccttgatagtggttgtattcaaacttctcttcttagatccgctaagatttgcaaagtagaaaaatacgtcattcttagttgtggcgtggattttagctggcgttttaactagcatatatttaggaataagcgacataccgttgaaagtagtgcggtgaccgtttttatcataaatgcgagagttggaactcaagattaaaacattttgcccatccattgagctaacattcaaagatttgatgtagcgttttttaccgatgttaacgtaagaagcggtagtgtagtggtagttcttagaagtttttgcatctacttttttaccttggatcaggataggtttgccataatatttaaaacttgagcctgatttaaccgttgaagcaacagtcatcttcttgccattgactttttgggtagtggtagtggcattgcctttgctgttgaagacttgaactgtgccgttaaaggatttcttgagagtaactttacctttttgtgattgcgtagctgcttgaactgtgtgaacaggttgattgataatggcagctgctggtgcaacactgattaataaagctgctgcgatagttgctaattttttagtagtcatattttgtctgctatataaaacatggaaatatgtagaagaatacgaatttcctacatatcagaaagatatatttttcctttctttgtttcatttactgtcgtcttcactagtattctgatattccaaataggagtaatcacattgactagctcttacagcttaaggacctagcaagccctgtttattttctttattttgccaaagctaaaagatttaaaaccgcattttcatctcgatcattcttgtagccacactcataacagacatactcattatgtttggtaccatgctttttattgccctgcaaagtgatcttttcctcgccttttttgacataaccgcacgcagcacatctttgagttgatgggtatgttttatcagccgagattaattatttgccataccaatcacacttataagttagtattcgtctaaacttgctaaaaagtgatctctacattccttttgaagctacatgcgtcatcatcatttctttgactgccaaatcttcaattacaatttgatcgtaattattaacaagcttagtagtaaatttttgtaatagatcgttttgaatattagctgctttgcgataatctctttgcagtttggttctcactgcaaagtaattatttgattttgtagctaacttaccgttaacttctcttttacgtgccagcattctttgataatgcttaatacgcttataaagcttttgcaatttaacaggcaaaatattgatttgcccctcggtatagttaaagtggccaacattgacatcaactgctgtcttttgctgggttttagcttttagttcaatttcttcttcataaggaagagccgcataataattatctttttctttgaagacacttactactttgacttcatccatctttagagcttcatagcttcatagctttttaaatcaaaccaaggctcttttgaaatgcttcttgggcgatcaaggcgaagcttaccattaacgatcttagctctatcagttttaaagccttgtctgggagctttcttagatttaaaactaggtattccccaatcaggttgtgacttatcaaagaagttcttccaagcattagctaagtctttaatcgctaattgtaaacatctggcagacaaatcatattgccagtcggctttatttgcgactagttcatcacggactctgcgttcgttaggactgggattatctttttggtttaatgtatgagcttcatacattaattgccaagtttctaagcctttattccagcagtatcgacgatagtcgcatagagcatcaagatgcttttgcatggtcttattaacttttagcttaactacttgtgtcttgatcgtcatttaagtactcgcctctaatctttttcttgtactttcttaagccatatagtctgcatgaaaacacatgaattatacttatcagatcatcaaccagttctttatcaggactagtgtcaatattattcaaaacaattatttcagtcccatgctttttacataggttttcaaaccaatcatagccaaaacggataaatctatctttataagtaatataaattttatctattttgttgttcattacttcgtctagaagattattccatttttgccgtttatagtttaagccgctgccaatatcgcttatttcttcgtctaatacgataccttgtgcgttagcgtattgtcgaatatggcttaattgatcttttaagtcatctttttgaccataagttgatactctggcataagcaacttgttttttatttgagcttagattatttttgctcaaatattgatatatttgatcttctgtatagaatctgcgattagtaggagagcgcttagctttaagaataccctttcgatcccatgtttggagggttctagtggttattcctaaacgatcagcgacatctttaggttttaaaattgtataatattcacttccatgtttaaatttctaatgaatattatggcaaatatttctattatattctataaatttccatattttgttaacagttaatcagctcctttgtaataatcccttaagttgattttagcacttatgagactataaaaataacctcgaaactcaaacgttttcggggttatttgattttattcacttaagtacttaggatcaataaatttattgatcacgttgttaaccttctttgaattatcgtacttgcggataatgttcaagaagtcttgtgcagttgcttgcttcaagtagtaagtttgatagtaatcgtgtaaagcatcgaagaacttggtttcgcccatggcaacctttaaaacagcagggaagtccatcccaagttcgtaagccatgtcttcagtgtcaacgccctttggtggattattaacagggtagttgatgtagttggccttttgattcttattaatgaattggttagcattttcttttaagatcttgttagcacgcttgacgttcttacgagtatagaacttgctgtgcatcagtttagcacagtaggccttattcttagtgtaggtcaaatcgtaaacgccattttcaaggaggttggtaagaccttcgtcaagccaaggttccatgtattcgtcgctgccgacagtgccgtagaaccattggtgaccaacttcgtgagaaacatcttcagttaattcattatatctatcaagtgggtgcttcttttgtaaaaagccgctggcatcgatcatgatcaagccaggatattccatcccacaggtatctttgccaagcaagcctttagtaatatcgatttctttgtaaggatatttgccgatctttttggtaaaaatgtgaaaactgtcttgggcagtcatcaaagcaagcttgttgtattgcttgctgtttttgcttgcaaggtagtagtcgttgattcttacgccgtttgcataagcgtggtcaaccttgaacttgttggaagcagcgattgcgaactcacgcatgttgttggcggtaattgtagttttgccatttttggttgtgctttgaccagaagcggcaactttgtagctctttggtgcgaagaagctaacgtggaaattgcttacagcactgttgcggttttcaccagcatcgtagtatgggtgataattccacttaccgtttcacggtcatgttgtaatttgttgccttgatcgtaagatcagccgcagcttgaacttttgagttgaagttaaataatgccgtaatggttactgcactcgacaataaaagtgttgttcttcttttcataattttccatccaagaaaaatttactctaaattattggaaattatcggcataaagtaaatctattttttgatgataggatataatttatgtataagtgaaaatgaatagatataaagaaagaagataaataagaatggttaaaagtattacacctcatttggtttatcacttgaatgggatgcaccatgttgtagcacaagttggtgtagtaaatggtgatcatgtttttgccttgcaacttcttcacagtgcacatgatgtgttggtttatagaaaacatgaaggtttaaccaagaacatcgattatactgatccacacttagtaatgatgggctttggccacacgcaaacctgggtaccagctaatgacaaggatgaatatttcgtaggtgctaaaccaaattcaggcaactggactactcaaattgcacgagtaaagtacccaagacttttaccagaaagatatacttcaaatacacaacttccacgtttgtcacacttgaatcacgtaaccgacgttccttatgatggtcatgatcacttgcacagagtagaagcttcagtttcaccaaatggcaagtatttcatgattgcctcaatttgggatgatggttcaggtcactttggtttgtttgacttaaatgaagtaaaccaaaagttgaatgaaaatggcactaagaacacgccaatcactgatttacattgcttgagtgctttccacatcgacaacttcgataatccaagtgttgctccagatgaagaaatgctacaaatgattgattcagttcaaggctatgctattgatgatgacaagaatatctatatttctaaccaattgtcaccaaagattaaccatgaaactggtgaagtaactacttggtcacgtaagattgttaagttcccatggggtgaaacaaacagtgataactggcaagtagctatggttgatggtattgatttaccagatcgttacagtgaaatggaaagtatccatgttaatgccgcaaatgatatttacttaactgtggcttaccaccaaaagtacattaagggtggagaatataagttaagaactttggaaaaccaaattttccatattactgatttgtagaataataaaaatttaaccaagtaaaaaagtgctgatgtgtctttgcttatgaagactatcagcactttttattcatattaatcagtaattctttctttaccaacagcacgttgttcggaaggattataacctaactcttcaatttcttgtcttttttctttgttattgatttgagaaagaatatcccaaaagttagacttatttttcttaatttttgaatttctgttagttttcattgttgttgccttcattttcactttctataaatataagtatactctgaaaaccaaatctatttttagctattaagatcgattaattcaaaatgaaatattttacaaaaatatatgcaatttatatgtaaatgatatacaatagtatcaaattcagaaaggagtaaaaattatggcagaaaaaacaacaggactttatgtcagaatgaatccagaaaagaaggaaaaggcagaagctattctgaaaaagctggggttaaattcagctacggcaattaacatgttctatgatcagattattcttcataatggtattcctttcagagtagagattccgaatgcatgggataatttagatcaaatgaataagtatgaatacgccaaactgcttggcgagcgcctgaacacattgagcggaaggaaagatttgcttggagatgtcgccaagaggcttgatgcggaaaagaatgaaaagaaagacaactaagttttgaggtaaaaattatgatggcaagaattattattggcattattgttgttttagttattgtgtatgtttgttgtggttttagaatcgttccacaaaataatgaaggtttggttgaaaccttgggtaagtattctaagacagtaaaagctggatttatctttgtctggccacttttccaaagaattcgcaaagttccattagcacttcaaccacttgaaatttctaagtactcaatcattaccaaagataacgctgaaatttccactagtttaactttgaactacttggtcactgattcataccgttacttttacaacaacaccgactcagttgaatcaatggtgcaattaatccgtggtcacttgcgtgacattattggtcgtatggatttgaacgcagcccttggctcaactaaggaaattaacgatcaacttttcactgcaactggtgacctgactgatatctacggtatcaaggtcgttcgtgtcaacgttgatgaacttttaccaagtgctgaaattcaacgtgccatggacaaacaacttactgccgaccgtgaaaagactgccgcaattgctaaggccgaaggtgaagctcgtaccattgaaatgaccactaaggctaagaacgatgctttggttgctaccgctaaggccaacgctgaagctgttaagacgcaggctgatgccgatgcttatcgtgtacaaaagatgcaagaagctttgtcaaaggccggcgaaggatacttcagaaaccagagtttagacagcttcaaccaattagctcaaggtcctaacaacttaatcgtggttggcaaggatgaaatgactgacttgggtaaggttcccgctttgaaaaaggtgtgggatgcaagcgacgataagaaagatgaataaaaattagctcaattctcaaatgaggattgagcttttttatacttttaacgtataccagcatcaatattaagtaattttcacactctcttgctcgccttatacttgtagtaacaattgagaacaagaggggaaagaaaattatgtttggtcgtacttattcagatttaggtccagttgttggacaaattaatggtgaagatattcgcgcaaatcaattagaaagacgtggctatgattgggaaaatggttatggcactccatccgatggccaagatactaatcgtgatggtcaaccagttagaaaattaactaaagatgccaaaagcattattatcttttggtcgtgttccggttcaactaagttgctcgcaagtaaagttgcgtgtgaaaccggtgctgatattttagaaattactttaagaaatccttatccagcaaattaccgtaaaacgctcaatcgcgctaactgtgaaagaattcaaaatgattcatcagagcttgagatgcagttacccgatttgagtcaatatgacacaatttacttaggctatcaaacttggacaatgactttgagtcagccaatgaaggcattcctacttgaatatggtggcgaattttctaacaaggagattgcgccattcctttctgaaggtggatatggttcgggtgatagtactgaattgatccgtgagtttattgcacgtgatggtggtaaaaataaaaaggtcgattggacatttgttggtccagaaaatgtcctttgtgctggcattactgataaatttgaaaaggcaggacaaaagattttcggccctaaccaaagaacggcacaattagaaggttcaaaggattatgctctgcgctttatgaacaaatatgatgttccaactgctcgccatgaaactttcaccagcgctgaaacctgtattgccgggttaaaggattttgcatatccggtggtgatcaaggaagatggtttagctggtggcaagggcgtaaccattgctaagaatcaagacgtcgctgaagaaacgatcagagaaatgtttgcatgtggccaaactgctgtagtgcttgaagaatgcttggttggtccagaatactcaatgtttgtggctgtttctgaagatcaatttaccattttgccaatggcgcaagaccacaagcgagttggcgatggtgataagggtcctaacaccggcggtatgggctcatattctcctttgccacagttgaaaaaagaagatcgtcaaagaatgatcgatgagatcgtgaagccaacgatgaatggcctggttcaaggcgattatcactattgcggtgttttatacatcggcttgatgatgacagaaaatggcccaaaggtcattgaatataatgtccgcttgggcgatcctgaaactcaagttgttttgcctcgaattaaaaatgattttgccatggtgattgacgcagcggtaaatcatgaaaaattgcctgagattgaagaaaatgataattctatcttgggcgtggttgtctgcagtaaaggctatccagcgcacccggcacctaacgtgaagatcggcaagttgccagaaggtaccaatacctatatcgattatgccaatgtgaaaggcgaattggataatctgataggtgatggtggtcgcttgttcatggtgatttcggaagctgacaatttagtccaggcgcaagataatgtgtactcttatttgagtaagcttgatctgccagattgcttttaccgtcatgatattggtaatcgtgctttgagagattagatgtgtgaagaaagtcccggttggggcttttttagtttggtttaatacgaacgcttggtcgtatttgatgggatcaatgataaaattttctccacataagtggaggttttgaggatcagtcgtctaacgggcaagacaggcttagttaataagcaagatatgggtccaattcccgtcgtccttaatatttgaataaagtaaaagctcttagttgtgaaaactaagggctttttcgttgtgtgtcgggcatggcatttgtctagtctagtgaaagtctagatcacgggtagttgtcgccaagtgtagcgaaccacaagccgttagcggtgacgctatgggtgaaggaagtggctagcgagttttccgagcctacgtacagaaacctggtcaggccaaatggtggatgagactgcagcacaagttaaagtccaaaggacaaccgtaaaaccaagacggtaaaccagggggcagtggaaaattaaagatgaatgtcttaccccgagagatctcgtggacaggtgaaaccgagtaagctttaatatcagcgatcgtaagcctggtcgaaaaaggttaatcgcgagaagtcagctgaggtcgtagtagtgctgaaggttttgtaatgaaactggagcgaagggcctaatgtttgtaagagcatatctcgctataagcaatgttcagacagtccggataagaggatagcctagcacaaagagaacgtaactctttgatggtgaaagcaattgggacaattctgaataaatttacaagtagaaatggagatatcacgagatggaactaattgaacagattttaagtcaaaataatctcaaggaagcaatcaggagagtcaaaatcaataagggagcgcctggtgtagacaggagaacagttgatgagcttgatagctattttaaaaagcatagctattttaaaaagcatcaagtagaaataaaggacgccatcatgaagatgaagtatcgtccgcaagctgttcgcagagtctacattcctaaagctaatggtaagaaacgtcctttaggaatacccacggttgttgaccgagtaatccagcaggctattgcccaagtattaatgaagatctatgatcctcattttagtgagcatagctatggctttagacctggacgcagtgctcatgacgctattgaacaagtcttggaatatttaaacgaaggctatcaatgggttgttgacctggatattgaaaaatactttgacacggtaaatcatgataaattaatttcaataattagagagcaagtaaatgacaaaaccaccctccatttaatcaatgtcattaagttaagacattgacaattaatattagacttttaaagcactgatttaacatttaattggttaaattggtgcttttttcgtacaacaaataaggcatagcacagattctgcttttttaagctacgcgatataaataatatacagctgatttgggcttaatatttctcttgtccttgcggcctggtctaattggaatggtataatagctgatctgaataaggatccgttcaaaatcttgcgttaaagaagaagccaaatacatgctctgaataatcaagcatgattgcttgaaattgatggcatattgatacttgcaatgcttttgcggaatataggcctgtgcatcaatttgactgattgcattaaacataatcatatgggcataaatttccatttcaataaatttatcttgtttggaatggaactgtacactgcctaaagaatacttcaatttcttgaaggaggtctcaataccccaacgcagatgataaagctctttaattctttttagcggataattttttcgatcaagattggttagcacaacttcccattcttctttgcctgatttggcatcattaattctaaatttgcaggctcgaaattttattgtgcataactcgccaaaatcccagcttagatcctgggtatttttagagcgatacttaatatattggcgataatgatgctggacatggtgaatattctcactggctttatgcgtgatgtagtaatagttagaagtagttaccaggcaggaaatctcacgatcacattcttgatcaggcaatgtcgttatttctttaactccgccttgtccagccttagttagtattatgtaatgacagttaggcaggcgattgcagttttcaatcatattgaaactagtgtagccacgatccattgttacaatatatggaccacaattcaaagctttaagcatttgaacagccgctttgcgttcatccatttctgatttaggctgaaaaatacaatcctggtaggtattattcaatagatcatataaggcattaacgtgaatttgacaatagggtttctttttatgagaagaagcttgtacaatgttattcgatttcggattccagatttgattaaagtcagagccatcaatggcaaacaaacggtagtgatgatcaaaaagttgaatattaaatagattttgattaaaaacagtcagaatatgtttaaaacaagcaggagaaagctggcttttgcgttgaacataggcagaagtactaactactttatcgttctttttagttgcatcttcgccaaaagctctaaagagttcactgtttaaattctgaccttgcatgttaattgtagttttaaggactgtcgctgcatctaaagtgcgtttcctggtaaaagcatgaggattattaataaaatcgtgaatatgatccccagtattattgataatttgatcaagacgttctagaatattcttatgaagggctttcataattaacaccatctttctggcaataattttgaaggtttaaaatatataatatataagataggcgaaaaggctggtcttttcgcctttattttatacaaaaaaagagatcgaatccaaatgattcgatctctaaaaaagcacccttaattgtcaatgtcttaacttaatgacattgccatttaattcgagcctttcttaaagctggagtaatggaagatggttgggttaagcctaataaactaggtgtaccacaaggcggccctctttcaccaattctatccaatatctatttagataaaatggataaagaattggaacaaagaggcctgcgctttgtccgctatgccgatgactgcaatatctttgtcaaaagcggtaaatcagccaaacgtgtgatgaattcaatttcatcatggctagaaagaaagctattcctaaaggtcaacgcaaccaaaaccaaagttgtacgaccaaccaagagcaactttcttggctttaccttctggaaaagtggcgaatactggcaagcaaagccaggagatgaccgcaaaatcaagctttatgacaagatgagagaacttctctgtcgcagaaaagcagctgctcagcctctatcactagtctttactaagataaatcaagtagttagaggctgggtcaattactttagagttggcgacatgaaatattttctaattaagttcagtcaatggctgcgtcataaagtacgggtggtaatcattaaacaatggaaactaccaaaacgaatatacattaacttaatgcggattaacaaggcactaaagtgcaattttagtgatgaagatattcataaagtagctaatacgcgcttaggttggtataaaagaagtacgggttatgtcattaactttctgcttagcccaaaagtattgggcataagcaaagcggatcgcccaggcttggtcgatccgctagaatattatttatctcgtaaataatcacaaacgtagcgccggatacggaaccgtacgtccggtgcaatgagaggggcgagttataaaactccctctactctattacctaaataatttcctataaaagatctaagtgttcattctgaagatttctaatttcattaggtgtatgaccatatttctttttaaagccattataaaatgaagtcttattagtaaatccaactcttcgataaagtacgtctattggaaatgatgtaaataataagtcatggtaaatgacagttagacgtttatccaataaaacgtcatgaaaggattgacctatattctgcttaaaaacggtgcctaagtaagaaggattataattcaattctttacctaattgtttcagtgaaatattcgtataatcttcagctattttgctaaatatttgttgagataacccttctaactgttgaggcttctttattttatgattcttcaatgctctttgaaattgacgattaagtacttggagtaaagatttgacagtttcaatattttggattaatctgtattttgcttataataaaagcaatggtaaatatttatttttagttacttaaacttcccacactaaataagccagtaatctcttgatcttgcttggctttaggcttctatattatttttgctagttttctttaacaatttttgcatgtatttgggtaaacgattgataaagtcagccgtgaattcagctatttgtgcttcactggcatgaaagacttgctttacgctggccagcattgcatcagtaatcaattgcaaggaatggctaaaagtaatgtccgccagctcatcaatcatgcaatagaacagctcgcctagcgtgcgttcatcttcatcgtcccgcttggcaactgacataagcatgtagcgagtaaaaactatggcaacatgagcggtcaaagcatcgtaagacaggccatgatattccgtacttagttttagataacttttgcaagttttgaaaaaaacctcaatatcccaacgcttgccgtagttgcggataatttcatcttcgctaagcgacatgtcggtacaaatgattgccagccaatccttgcgattggcacggtttctaacgcagacaatccgtgcatctattttagcaccgtctttgtcctggcgtccgactttgactgggattgacagcaggtagcgagaacggccgcatcgctttttacagctgcgataaatctgtttgatgtttttgcgttctccctcaaattcatatttgattttggagctaaccttaaccatggcaatcacatccagcttcctttgcttgagctggacgatttgatgtggatttgagaaccagctgtcaaacagcacgtacttggcttgatgacctgctttcatagcttggtcgattaaattaaccatcacgtctgtgcctttagtccgggcaagcatacgtctttggcaagcaatggtgcgctgatcaaaaactttattttcgccaatcatattctgtagcttctgagaagacagcagcactgaattgattggcatgaaagaagctccatcagtccagcccagggtcatcatgcgaaaacctttcttgtaagtcattgatacatggtcaaaaactttggcgactaattctgttttcttgaagccggtcctagagaagtaggaatcatcgacaacaaagcaatcagcccgtttttctgaagtcaaagatcgcaagtggttattaatgatttgcgcagacagaagtgtggtgaagtggagccaattgacgtgaacgttgcgcataaaacggtaatatgagttcttggaaaaattttcttgaaaatgatccattttcagctgcatatataagctgcggtcacgaaagacattgcttaaaacgtaaagaaacaagctgaacaggctaatgcctttttccttgcggaagccacattttctcaacagcttgatcacctgaaacttcttgatgaagctgatgattgagtttgaaaatagttgttcattttgttggtcaggagatggtaaaatagacattggcacaagcctttcatgcaaataaattatgttttggtcaatataattatagcaatgaaaaggacttgtgccttttatatttgtcaaaacacgcagaatcacaatgaaacaagcaattttgcgtgtgggaagtttaagtagttaatgaaaggcccaaaaaatatgttatctaaaagaaattatcaagaacatcttcggaagatggcgccaaaaaaagagcgtttttctattagaaaattttctgttggagcagcgtctgttttaattggatttacttttgtgagtatggctggaagtcacaaagttcaagctgcagacgtacctgataaatctgtagtagttgacactttcaataaagataagagtcaagagctaacagaaaataagactattgaaatgccaaaagcagaaaaaacggctgttagttctgtagtacaaaaaggtgcctctgcaaataaaattgaagcagaaaatactacacaagttgataaaaatacagaaggttctgtaaaggtacaagaaaataaagacgcagtacaacctaagactgttaataatgaaaatgtattaaatacgcgtggtgctagttaaatcgttctagacaataagccaaattataagctaaaattgcaatttccaaccggctttgaaagcctatcagactacgtgctcgattgttctcggcattgtaataggtcagaagcgaaaagtcgctttcaattgttctgcgaatagccatcaattgatgatcattgtgctttttagctcctgtcatatttttacgatatggtgtccaaagttcgtaacccatttgttttagctgttgatgcagttctttgcctaaatagccttcgtcgccaagaagatagtaattagatggatgggtattttctatcagttcaactgtctccctggcatcatgaactgatgcctttgttacgacataatcaagaatgtaaccgtcatcgctaacaatggcatgaactttgaaaccatagaagtaaattttcttggtggccttataaccaatgttggcataaccgcgaaaaattttagcacgatagtttcgaattggttggcaaacaggtaccggaaagctgtcaatgatcaagaactgtccattcaggtcaacctttttattcatttcttgccgtatctgataaatcaattgcaatagctgacgtgaacgccgattaaaacgtgagtgtgataaacaattgaaacattcacagaatcttctttgtgattcaattcctgtcttagcttgccagataagtaaagccaaaatcagactgtccgtagttttaatttgatcaatatttcgccgatgagtaaactcagccggtgcatacaaacgataccagtgccgacaaattatcactaaatctttaaaactaacttgtaaatggtggctaaaacgcttaagcttaaggcagttcaatcagatcagactcttttctattattactatttacaagtcgagtctaacaagattggacttttttattaactaaaacgatttaactagcaccacgcgtattaaatgtatcaaaagcacagtctcaatctaatgaagctgtaactaagaatgcagcagaatcaaaagtagcagcactacgtgcttttagagcagcacctcaagctactcaatcacaagatgccaaggatttccaaagcttagttaatgccatgaatgatagtagcattggaactattaatattaccaatgatattactattaccggtaaagttaacggccttactacttctggtataagtgatataaacaagcactacctttatctgcagtctaaaggttcagctcgtgacttaacaattaatggtaatggtcacactatcaactttgccggttacagtattgctttacaagacgagaactaccacaatgctgctggcccttggaacattactttaaaggatatgacgattgagggtagtaagtatggctattcaccaatttcattctatagcagcaagactaatactgaaaatagtaaattaatttttgatggtgtcactgctaacttgaatgatcgtccattagttgacaagtatggtgaaaacttaccagttcactttgccggtgataacaacattatgcttaataatatgtcaattggttacaatctagtaactggtaagactgtaaaatttgactctggtaatactacttttaatgttggtggtaaagtaactggaaatgctattaatcctgacaactgggtaattcgttcaactgaaaatgctagtaatagtgaaaatccttcaactttaattaatgaaggtgcaactgttactattaatgctaaatcagacgacttacgtggtatttatgctgggcgtcaactaacagctggtcagccaatctatggcgttactgttattaatggtactttgaatgccaacatggcagctggtcactcaactgcaatttggtcacatgatcttgaaattggtaaaaagggtaatgtaactatccataccaagcaaacaaatcaggctgatggtgttgaaaatggtacttctaattcagtaactaattataatggtacccactatgctccaatttcattaggtgttgttccaataagtagtgttgccagtccattatctaagcaaactgccagcttaattaacaatggtagtttgactattatacgtgatactactgaaaggacattggtaccattaatttcaatgggtgacggtggtttaagtactaataccacgttgaaatttggggttagtgccggtgctactctcgatttacaagacaatgcaggtacatttcaaaatggtactgaacctaacacaccattgaatggtttgattactatgtggggtacgagtggtacagatttattggaatttcttaccccagcatatgtcaacttacaacgtactggtaatattcgtggtacattgattagaatggaaggtgtctacaacagtactactgttaatggaccaacaccagtggctcaatgggatcaaggtaataagactactattcctaatgatgtttggtatgtaagatacctgatatctgcgaaccaatggggtaataactctggtcaatttatgagtaaagatcaacatcctaatactgtcgttgcgcagaaaggtgttgatacactttataactctaatgctactgtcttaatgtctaagaaccaaggcgctgataaatacgaaaacggtacaatgccaactgaagtacaacaggcacagcacttgaacagcttcttaaacaactttaacttgtggcgtccacaaagaatggctatgggtagcaagttgaatgatagtcctgacgttaagattgatgattttgataagtatcacccagaagtgcaaacgattgatggaactactcgtcaaacattaagtgatcttgatgctaataagggacttaaagatttaattggtcctgatgaacaaccaatcactgacttcaaggatattgttaagcatgttacttggtacaattctgcaactgataaggatgaatggaacaagatcatgatccagccgactgacagcaaggatccaagtgcccgagttccttatccaaaaccacaaaacccaacaggtaatttaaagactactgatggttttgcttgggctaaggtaacttatgctgatggttcagttgactttgttaagattccacttaaggttactgaaaagaagtatagtgaagaattaacaccatcttatcctggtgtttccgttgagcaaggtaagtctgatagcgtagatccaagctttaaggatgaaaacgataaggctgctgatgctccagcgggtactaagtacactgcaggtgaaaatactccagattggattaaagtagatcctgatactggtaaagtaactgtttcaccaactgatgatactagtgtaggttcacatgatatttctgtaacagtaacatacccagatagcagcactgaccaattaactgtaccagtaactgttaccgaaaagagtaacttagctgagaagtatccagttagctacgacaagttaaatgttgaaaagcctagcggcgacacaccagcaactggtgcagtagatccaaaggctgctgcagatatgccagaaggtgcaatcactggttacgaaaaaggtgactttgatgctccagcgggtgtaactatcgatgtaaatcatgatactggtaaggtaactgctagtgtaggtaaaaacgcaacattaggttcatttgaagttccagttaaagtaacttatagtgacggtacttatgctgaagtaaaagttcctgtaagtatcactggtaacaaggttgatccaggtagtggtgacgttgtttactacggtgatcaaagtatggtggtcttcaatggcaaccttactactgttcacaagactactgatagccatgaattaagtgctaaagacagtgccttccaaacaatcacatattactctgattggaacaagaaaggtaacatcgttagcgactataacaagcatgtgatttacaagctaagtgctgatggtactaagtatgtaaacgaagctgatgctacggacagctttgatgctagtgcaattagctttaactggcagaagggttatggagttaacactggtgttgataactttagcaatggttctgcagacacactttaccaacttgaaaatggtgctgttaactctgaagagcaaactgatgccaatgatccatcaggtttagcaggtaactctaagtatcgttacgactttagtattagtgatactaatgtattgcaaaaactaggtttatcacctgctggttacaatgcttgggctaatgtttactacaacttccttggtgcaactggtaaaattaatattccagtaaactatggcagtgaagtatcaactgatgaagctggtattaagaattacttagcaactaacagtatctcaggtaagacatttgtcaatggtaacccaactggtattaagtgggctgaaaatggtatgccaggtaaagatggcaaatttgctgcttctaacatgactgggattgttgaatttacttttgataacggtactaagttaaatgttcaagtaacatttaagactggatcacatgttccaacttcaggtagtaaagttaatgacgatactaacctttatgtagaacgtacaattgaatatgatgtaactggaactggtcattcaccaattaactcagtaacacaaaaggttcactatgtacgtgatggataccacaagattaatgctgatggtacagatgctggggaaattatctggaatgaatggaaactggctgatggtcaaactgctgaattcccagaatacagtgttgaccaaatcacaggctatgatgcatatatcaatggtgcaaaggctactcaagttgatgctgccaaagttgctgaaacaaatggcacaccacaaaatggtcaaaacatcacaaaaagcaaaatagtactccagtaccatacaaaccaggtaaagatggcgtaaacgatgccattaacagatatgtaactcgtacaatcatcgttaaggaaccaggtaaagaaccacaaactaatactcaaactgttcacttcactaataaagataaagatggtaatagtggctacaaggatccagtaacaggcgagattaaatacaatactgactggcatgtagcaagtgatttgaatgctaagactggtagctgggaagaatatacagcaccatcagtaacaggttacactccatcacaagctaaggtagaagcaaaaacagtaactgcagaaactgaagctgctagcgtaacaattagctacactaagaatgcagatattccggtaccatacaaaccaggtaaagatggcgtaaacgatgccattaacagatatgtaactcgtactatcaatgtagttgatccagtaactggtaaaattagtacaagtgtacaaactgctaagtttactcgtgaagataaaaatggtaatagtggctacaaggatccagtaactggaaagacaactataaatccatggactccggctaaacagggactacgtgctgttaatgttgagcaaatcaatggttatgtagctaaagttgatggtaatgtggacgcagtagttgtaactcctgattcagctaatatggtagtaactattacttaccaagctaataaaccagaaggtcaaaacattgctgttaagaaagatacagtaccagatccagcagatggtattaagaataaggatgacttaccagatggtactaagtacacatgggagaagactccagatgtaagtaagccaggtgatgtaccagcaatagtagtagtaacttatccagacggttcaaaggacaaggtagatgttcatattgttgtggataacccaaccccagagccacaagatgttcacactactccaggtgtagtaccagacccatcaacagccatcaagaataaagatgagatgccagatggcactaagtacacatggaaagaagttccagatgttaactctgtaggtgagaagactggtatagtaactgtaaccttcccagatggcacatcagtagatgttaaggttaatgtatttgttgatcctgttaaggaaaataacaatacaattgcagattcaaacaatactaattcttctgataagaatactgcaaatgctgcaacagttaatggtaagtcagaaaacaagaagactttgccacagactggttctaagtcagatgccgctgcaattgtcggtttagcagttgccatcgcaggtagcttattaggcttaggtgttaacagaaagaaacgtcaaaagtagaagaactatttataattgatccaaagaaagattaggtgataaacctaatctttttttgtgccttaatttgttatttgatcatgtttaataatttttccgtaagcgtcgtaagcgtcatataaccgagtatcttttttagtccgtatttttcaggtattctaatctcatcaatttaatggaggttaagaatatgatcgaaaaacaacaacccattgtggcacttggccgttcttctaaacctaagaaggctcgtccaccacgcaataatctgttgcttagtttaaagaagaatgacttagagctgaatttttacagcagcttagaccctgaaattatgaataagctgcttgagaaagtcttgccatgattaagctcagtgacttagggcaagtctatatcgtttgcggcaagacggatctgcgtaaaggcattgatggactagcaactttagtcaaagaacagtttgaacttgatccttttagcggcaaagtcttcctcttttgcggcggaagcaaggaccgcttcaaagccctttattgggacggacaaggtttttggctgctctacaaaagatttgaaaatggaaaattgaactggcccaggaatcaaaatgaagttcaagctttatcttctgagcaggtcgactggctaatgaagggcttcgcaatcaatccaaaaataaagaacacgaaagcgtgcgaattctactaacacttgacatcgcacgcttttttgatattcttttaactaataaatttaggaggaagtttaactcatgtcacaagaaaatttggaaaagattattgcacaacaagcaactactattcaaaacttaactgatgaaattaagctcctccgtgaacaagtagcttacttaacgcaaaaacgttatggcaaatcttcagaacaaatgcctttaaatggacaaacaagtctctttgatgaacctgatgctcaagatgacggagaacgtccccgacgccgccgttcagactattacttataaaagacaagctcacaaacgaaagcgtgctgacttactagctgcccttccagctgaagaggttcaccatgaattaggcgacaagcattgtcctgattgtcatcatgaactgattgagataggcaagcagtcagttcgccaagaattattgtttatcccagctcaacttaaaaggttagaccatatccaacatgcttacaaatgtaaatattgcagtcaaagaaatcttagcgacaagatcattaaagctgcagtacctaaagctcccctaaaccatggtctaggttcagcttcactcatcgctcattcactttatcaaaaatatgaaatgaaggtgccggactatcgtcaagaaagcgactggaagaagatgggactagaagtttcaagacagatgttaaattattgggatttgaaaagcagtcaatactactttaaaccagtgtatgatctgcttaagcaaaagctgttaatgcggccaattttacatgccgatgaaacttattatacagtcttagaaagtaaaacaatcaagacttactattgggtcttcctttcaggcaaacatgatcaatacgggattacactctatcatcatgatccttcccggagttgcaaggttgccttaaactttttaggaaactatcccggttatttgcactgtgatatgtggcaggcttatgagcaattgccgaaagcaactttagttggctgctgggctcatgttagaagaaagtttcacgaagccgtaccacaacaggcttctgaaaagtcccttgcccaaaaaggactcaactactgcaatcgcatgttttacttagaacaaacctgggagaatttgagcaaacaagaacgttaccagctaagacaagcaaagctcaagcctctgatgcaagagttcttcaattggtgtgagaaaaataaaatcaccgttttgccaggctctaaattgggaagagccattaattataccctcaagcatcaagctacttttgagcatgtcttgcttgatggcaatttagaattatctaacaataaggctgaacgcgctgtaaaatcactcgtcatgggccggaagaattggttattttctcaaagttttgagggtgctactgcaagtggctttattctaagcttaattgaaactgccaagagaaatggccttgatcctgaaaagtacttgaattatttgcttcagaaattaccgaatgaagagattctggattcggaaacccttgaagcttatttaccgtggcaagagaagatccagataaattgtaaataaaagaacttaaataaccgtctcagtataacagtaactgggacggtttttaagtacactattttatttgacgcttacaaaatatatagaagaagtagataaacaaatggaggcattaggtgagtttttctttataacaaattattcaggaattaaggttaagtgagtatggaagaagtatttaatgatggtatttacgaatgcatagtagtagcaaccacggtagaaaaatataaggtaacttccaaagttacaattattctacaaattagagatgatattgatgccgttgaattaaaaaaactaatagaatttatgctggatataggttaaaactagaatattggcaaaaaaagatttcgcatactttcaatattaataattttcaatatttgtgttatgcgtgtggccttccgagaccgtaaaatagtttgtgtaaggatgaattattccttaatttaatttcctaaaacattagaaaaaggagttcctttctcgtatgattggtttgaacaaaaaaaacatacagaaagaagaactccttcatgaagagactgtaaaatagtttgtgtaaggatgaatgattccttaaatttatttctttaaacattagaaaaaggagttcctttctcgtatgattggtttgaacaaaaaaacacatacagaaagaagaactccttcatgaatgattttaccaaagattttgctcaagctctattcaatccagacaaaataaatgatttattgcgcaaagagctacaacaggctgttaataacttgctagaagctgaattgactgcctttctgggctatgatccctatgccagaaatggctggaatactggcaactctagaaatggtgcttatttccgcaaagttgatacgcaatttggcccaattgaagtgcaagtgcctcgggatcgcaacggtcaatttcatcagcacacgctgcctgactacaagcagcactcggatatcttggaaagcatgattatcaagctttactccaagggcgtgaccaccagggaaatagccgatctaattgaaaagatgtatggcagccattacagtccagctcaggtatcaaatatttccaagcagatgattccaaaggttgaggcttaccacaaacgcaagctaagcgacaagtttttctgcgtctatttggatgcgacataccttcctttgcgccgagaaacatttgagcgtgaagcagtctatattgccattggcatcaagcctaatgggcacaaggaggtcattgactactgcattgcgcctagcgagaacattgaagtctggacagatatgcttcaaaacatgaaatcccgaggcttaaagcaagttgagctttttctttctgatggtgttgttggcatgaaaacagccttggccaggacttatcctaaagctcattttcaacgctgtttggttcatgtcatgcgcaatatctgcgctaaagtacgcgtcgacgatcgtgaaaagatcatgaacgaattcaaacaggtgcatcaacagacaaacaaagaagaagccacagctgtcctgcatgacttctataccaaatggggcaaggtttacagccatgttatcagaagcttgaaagacatagaaccagatctgctggtcttttataactatcccaagcagatcagagcttcaatttattcgactaacatgattgaatcatttaacaatgtgatcaagcgcaaagctaagcctaaggcagagtttccaactgaacagtcgcttgatgcttttattggcattcaggcaatgagctacaatgaccgttatttcaatcgaattcataaaggctttggtcaggttcaggacaccttagaatcctactttgattaaataaataattaaaaaatcaatttacgagaaagatctatttacacaaaagatttgacagtttcttcatgaatgattttaccaaaaatataactcaagctctattcaatcaagataaaattaatgatttgcttcgtcatgaaatccaacaagctgttaatgacatgttagaatctgaactgactgcctttttaggatatgatccctatgctagaaatggctggaatactggtaattctagaaatggtgcgtatttccgtaaaattgatacccagttgggatcaattgaggtacaagtgccacgagatcgcaatggtatgtttcatcaacacactctgccagactataaacaacatactgatctcttagaagatatggttataaagctttattctaaaggtgtaaccactagagaaatagctaatttgatcgaaaaaatgtatggcagtcattatagtccagctcaagtgtctaatatctctaagcaaatgattcctaaagttgaggcttatcacaagcgtaagctgagcgataagttcttttgtgtttatcttgatgcaacgtatataccgttgcgtcgagaaacttttgaacgagaagcagtatatattgccattggcatcaagcctaatggtcacaaggaagttatcgactactgcattgcgcctagtgagaatattgaagtctggacggagttgctccagaacatgaaatctcgtggtttaaagcaagtagagctttccctttcagatggcgttgtcggcatgaaagcagcactggcaaagacctatcctcaagctcatttccaacgctgcttggtccatgttatgcgcaacatctgcgctaaagtacgcgtggacgatcgcgaggcaatcatgaacgaattcaagcagattcaccagcaagccaataaagcggctgctgttgatgtattgcatgctttttatgccaaatggaacaagagctacaatcgtgtcattagaaacctgaaagacatcgagccagacctgcttgttttttataattatcctaagcagatcagggcttcaatttactctaccaacatgatcgaatcctttaataacgtcattaagcgcaaggctaagcctaaagcggagttcccgactgaacagtcgcttgatacttttattggcatccaagcaatgagctacaatgaccgctacttcaaccgaattcacaaaggctttggtcaagtccaggataccttagaatcctattttgaataaataaaacattaaaaaaacaatttacgagaaagatctatttacacaaaagatttgacagtttcggaaaatcaactactttaagaatgatcgcgggtttggaaaatattagtaaagggactttggaaattgaccatcaagttatgaatgacgtcgcacctaaagatagaaacattgctatggtttttcagaattatgctttgtatccacacatgaccatttatgacaacatggcatttagtttaaaacttcgtcattataaaaaagatgaaattgataaaagagttaaaagagctgcaaatattttgggattacaaggctatttaaagaaaaagcctagtgcactttctggtggtcaacgtcaacgtgtggctttaggtcgtgcaattgtacgtgatgcacctattttcttaatggatgaacctttatctaatcttgatgccaaacttcgtgtagttatgcgagctgagattgctaaattacatcaaaaattaggcacaacaaccatttatgtaactcacgatcaaactgaagctatgaccttagctgatagagtcgttgtaatgtcagttggcaaggtagagcagattggtacaccacttgaagtttataatcatccctcaaatcaatttgttgcaggttttattggttcgcctcagatgaatttctttaatgttcattataggaatggaagtattacagatggtaagggcttgaatattggaattccggaaggtaaagccaagatgcttgaagaaaagggctatgcagataaagacgtaatatttggaatccgtccagaagatattcattctgaacaagcctttctggaaacatggccaaatgcagttgtagaatcgcaagttgtcgtttctgagcttttgggttcaacgattcaactgtatcaaaaagttgatggtactgagtttgtagctattgtaaattcccgcgattatcacaaaccaggcgacaaggttaaaatggggtttgatgttaataaggcccacttttttgataaagacactacccaagccatcgttaattaaatattatttttctctccccctagataaataaaacaatgctttaagatagttcactattggaaattgacaataatgaactattttttgtactaaccatctatggaaaaatgagaaactgtcaaatcttttgtgtaaatagatctttctcgtaaattgattttttaattatttatttaatcaaagtaggattctaaggtgtcctgaacctgaccaaagcctttatgaattcgattgaaataacggtcattgtagctcattgcctgaatgccaataaaagcatcaagcgactgttcagttggaaactctgccttaggcttagctttgcgcttgatcacattgttaaatgattcaatcatgttagtcgaataaattgaagctctgatctgcttgggatagttataaaagaccagcagatctggttctatgtctttcaagcttctgataacatggctgtaaaccttgccccatttggtatagaagtcatgcaggacagctgtggcttcttctttgtttgtctgttgatgcacctgtttgaattcgttcatgatcttttcacgatcgtcgacgcgtactttagcgcagatattgcgcatgacatgaaccaaacagcgttgaaaatgagctttaggataagtcctggccaaggctgttttcatgccaacaacaccatcagaaagaaaaagctcaacttgctttaagcctcgggatttcatgttttgaagcatatctgtccagacttcaatgttctcgctaggcgcaatgcagtagtcaatgacctccttgtgcccattaggcttgatgccaatggcaatatagactgcttcacgctcaaatgtttctcggcgcaaaggaaggtatgtcgcatccaaatagacgcagaaaaacttgtcgcttagcttgcgtttgtggtaagcctcaacctttggaatcatctgcttggaaatatttgatacctgagctggactgtaatggctgccatacatcttttcaattagatcggctatttccctggtggtcacgcccttggagtaaagcttgataatcatgctttccaagatatccgagtgctgcttgtagccaggcagcgtgtgctgatgaaattgaccgttgcgatcccgaggcacttgcacttcaattgggccaaattgcgtatcaactttgcggaaataagcaccatttctagagttgccagtattccagccatttctggcatagggatcatagcccagaaaggcagtcaattcagcttctagcaagttattaacagcctgttgtagctctttgcgcaataaatcatttattttgtctggattgaatagagcttgagcaaaatctttggtaaaatcattcatgaaggagttcttctttctgtatgtgtttttttgttcaaaccaatcatacgagaaaggaacccctttttctaatgtttaaagaaataaatttaaggaatcattcatccttacacaaactattttacagtctccaaaaatgacaaagtaaatttgcaagaatagagttttattttaatattaatatttactagatatagattaagcaatgaaatgatgattttaaagtggtatgacacagattataaaacaggacatctgagaagcggtaatatggttaccatatttatgctgatagccactgttgccaagattgaagtaatcttaaatagtaatccacattggtgccttccaccatttaatgaatttttgtttagtagtgagataaagcgtagtgtgtttaagcctgatgatgagttgaaacaatttattagagattttaataagaaacaccaaaaacaaaattgataaatttccacttgtaactactattcttgtttaatatcttttgatatagttttaaacaagaggaaaaacaaatgttttgtcttaaatcattatttaactcatgagaatgtaaatacgataagcaatggtttaaaatcttcacgacgtccattttttatttaacttaagagaattacaattaaagctccaatcggggcttttttctttttcattaaacttcctattaaaagattacccttgaaactggtaaaatagataagtaagtatagagaacaatttttataaaaggggaataaaatggcagataaaaaattacttctaatcgatggtaactctgtagctttcagagccttttacgctctttatcgtcaactagaatctttcaaaagtccggacggcctgcacactaatgccatttatgcttttaaaaatatgcttgatgtccttttgaaggacgttgatccaactcacattttggtagcttttgatgcaggaaaagtaacttttagaacaaagatgtatggagaatataaaggtggacgtgccaaaactccagaagagcttctcgagcaaatgccttatattcaagaaatgcttcatgacttgggtattaaaacttatgaattgaagaattacgaagcagatgacattattggtacttttgtcgataagggtgagaagaacggctttactactactgttgtgactggtgaccgcgacttgactcaactcgcttctccaagcactactgttgaagtaaccaaatcaggggtttctcaacttgaagcctacacgcctgaacatatgaaggaagttaacggcgtcactccaactgaattcattgatatgaaggctttgatgggggataattccgataactatcctggtgttgaaggtatcggtcctaagacagcctctaatttgattcaagaatatggttcagtagaaaacttatacgatcatattgatgaaatgaagaaatctaagcgtaaagagcgtttaatccgtgaaaaggacaaagcatttttagctaaaaaacttgccacaattgaccgtgattcaccggtaactctagatatcgatgatataaaacgtcagccagttgattatgaaaagctgcgtcaattctatgaaaagatgaacttccgtaagttcttagctgatttaaatgcttcaggtgccggtcaagatagtactgaagttgaaaaagtggaatacatcgttttaaacgacgacaacgttaaggatgttaaggctactgaagatgacaccattgagttttatctagaaatgctcggtgctaactatcacttagctccttttgttggcttcagcttgaagatcactgacaagatctacgtttcaagagacgtggaattgcttgaagaagataatatcaagcacatcttagaagacgaaaagattaagaagaatgtctttgacctgaagagaacaatggttgctgcacatcgtttggacattcacactcacggccttgattacgacatgcttttggcatcctacttgatcaataatgaaaataactctaacgaccttggtgaaattgcccacctttatggtgattactccgttaagactgacctcgaagtttacggaaaaggtaagagcgagcacatccctgatgacgatgatgaattattcaaccacttagcttctaagatcaatgctatcgaatcacttaagaagccactgcttgaaaaactcaaggatcatgaacaagacgacctatttgaaacaatcgaaattccaaccgcgcgcgttttagccagaatggaaatgaacgggatgaaggttgaagcaagtactttaattcaactgcaaaatgaatttgccgttaaattgaaggaactcgaagacaagatttacagtcaagctggtgaaaagttcaatttgaattcacctaagcaattaggtcacattttgtttgaaaagcttggtttaccaccaatcaagaagaccaagactggttactcaacttcagttgaagtcttggatcaattaaagacgcaaagtccaatcgttagtgaaattttggattaccgtcaaattgccaagattcaatctacctatgtaaagggtctgcttgacgttatccaatcagatggccgtgttcacacgcgttacttgcaaaccttgactgcgactggtcgactttctagtgtggatcctaacttgcagaacatccctacccgcaccgaagaaggaaagcaaatcagaaaggccttcgtgccaagcgaaccagacggctacatcttctcttgcgactactcacaagttgaactccgtgttttagctcacgtttcgggcgatcaaaacatgcaagaagccttcaagaccggatacgatattcactcacacaccgcgatgaagattttccacttggattcaccagatgaagtaacgccattgatgaggcgtcatgctaaagccgttaactttggtattgtttatggtatttctgattatggtttatcaaagaatttaggtatttctagaaaacgtgctcaagagtttattgacaattactttgaacaatatccacaaattcgtgaatatatggataaggctgtgcaaacggctcgtgaaaagggctatgcagaaacaattatgcacagaagacgctacttgcctgatattcatgctaagaaatttacagttcgttcttttgctgaaagaactgcgattaactcgcctattcaaggatcagcggccgatattatcaagattgctatgatcaatatgcaaaagaagctagatgaactacatttgaagaccaagatagtcgttcaagtacatgacgaattgatttttgatgtgccaaaagatgaattagaaacgattaagaagatagttccagaagttatgcaatcggcagtgaagcttgatgtgccattgattgcagattctggttggggtcataattggtatgatgcaaagtaggtgatttaatgccagaaatgcctgaagtcgagacggtgcgacggactttaactccgctaatcgttggaaaaacgattaaaaaagtagtactttggtatcccaaaattgtggcaacagaccataagaaatttatcaaagaactaccaggtaaaagggtcttaaagattgatcgctatgctaaatatttactgatacgcctaagtgataatttaactattgtgtcacatttacgcatggagggaaaatatcatttaaccactcccgatgcgcctaaggataagcatgaccacgtagagtttatttttactgatcaaactgccttgcgttataatgacgtgcgtaagtttggccgcatgcagctgattttaacaggtactgagcgccaagtgacggggattggcaaactgggccctgagcctaatagcatagaattttcgtcagattattttatcaaggccttgagccgtaagaagaaaaatattaaaaatgtcttgcttgatcaaacaaccgttgcaggtttaggtaatatctatgttgatgagacactgtggcagagtggaattcatcctttgagtgccgcaaataaaattccgtcagaaaaagcaaaagagctgtggcagaatattaaccaaactattaaaattgcaacaaaaaagcgtgggacgactgttcatacttatttagatgccaacggaaatgttggtggctatcaagaaatgctcaaggtttatggtcatgcaggtgaaccttgtgcaaagtgtggcacggaactagaaaagattaaagtatcaggcagagggacaaccttctgtccacattgtcaggtggtttattaatgagctatgttttagccttaactggtggtattgcaactgggaaaagtacagcggaccagttttttaaagcaaataaaattcctgtgatcgatgatgatcagattgctcatgatttgatggagcctgggcaagcttcttggcaggcgattaaagattattttggctcagagtatttaaatgatgaccaaacgattaatcgaaagaaattagggcaattggtatttaaggattcgcgggctttaactaaattaaatgagttaacgcatccgttgatttttttgcaaacaaagaaattgctaaatcaatatcaagctcaaccaatagttattcttgatgtcccactttattttgagtcagggatggataagaaagatatagctgacggtgttttagtgattactttgcctgagaaaatgcaattacagcgtttgaaggagcggaatcatttaaccgatgaagaagcaagaattcggatgcaaagtcagttgcctatggtcaaaaaagagcaattggctgattttgtgattgaaaatactggtacaataaaagaactagagaataaactagcacaattattggtaaagattagagaagagggatagctatggaatgtccaaattgtcatcaaaatgcttctcgcgttattgattcgcggcctagtgatgaaaaccgggctattagacggcgcagagaatgtgaaaattgttgttttcgctttactacttttgaacgagtggaaactgctcctttgttggtagtaaaaaatgatggtactcgtgaaccattcagtcgaaagaaaattttgcacggagtaatggcagccggacaaaaacggccaatcagtagtgaacaatttgagcaattggttgatcgtgtcgaaaataagataagaaaacaaggcgttagtgaaatttcatctaagaagattggtcagtatgtcatggatgatttggctaatttggatgacgtatcttatattcgctttgcttcaatttaccgtgagttcaaggatatgtctagctttatgaagacaatggaagatatgatggccaaaaaaggaaagggtaattagtcatgtttgcaacgtctgatcctaagcatctttattatgtagccaacaagattaccctttttccagagaatgagaaaatcttgattaaactgtatcagcctttggttggcgcggtggcaattgccttgtatcagactttaatcaatgactatgatccatatggtattgtttctgatgcaaagggaatttattcactacaggagcaacttgattgtagtttaaaagatatgtttcattctttgcataaactggaagccgtaggtttagtgcaaacttttttagcggataatgtcttcaataatatcattgtttttaagttattacaggttcctagtgcagacaaattttttgcaacaccactgctagcaagtttgttgaaagaaaaagttggcagcccaacctttcatgacttgagtcatgcttttgctaaggaagcaaaactgcgtgaaaagccaatcaagaatgcgcgcgatgtctcagccaacttttttgatgtttttcgcttgccaggggatgaagcaattaatccatctaatgaggtagtagaagctgcgcaggaaaataaagcgcctgaggtagaaactgctgaaattaatgcccaggatccaattgattgggatctgattaaagatcaatataatgtctatcaaattccagctcaagaagtagaaattaaaaagaaccaaattcggggcttaatacagacatataatttatcggaacaggaatttgtggatgagactgttccctgtttgcatggtacacataaattaaacatgcatgaaattagtaataccatagcagaaaattataaacgattgcatactagggaaaacattcaaaaacaaattgaagaaggcaaaaagcgcgctattgcgactatcaaaggtttggacgctaatgatagaaaactgttactcgaagctaatgaaaattccccatctgaatttttatacaaattaaaaactgaaaagggtggaattgtagctccaggcgaaaactatattattaatcagctgcacacgcagtatggcttgccggaagatttgattaatattttgattcatacctgtttgacctacgatactgttgtaacttctaatcgtgcttatcgaatagctaatgattggctgcaaggtggtattagtactggggtacaagctcttgaatatgtgaagaagcgtaaagccgatattcttaaaaagaaaaatcgacagtcatatcgacaaaataagcgagtcgaaaaaggtaccgattggagcaagaaaaaggctaaaaatgaaggtatgtcaatagaacagctgaaggatatctttaaggatctgaaaaataagtaaatagagggtaggtgaaataatggaagcaattggtgatttgcttaaaaaaatagttaaagagcgtaatttaggtaatgagaaagaactgttgaaaactgctttacacgatccagatgtgcaagcgtttttgcaggcaaatagggaaaaaatagataaggcgatgattcgaaatagtatggccaatatctatgaatattatgcgcaaaaacatagtcagaatcaggtgctggccggttatgctccgcaattatttttgaacggcaaagtaattgatgtacgttacaaacctaccgaggctaagattgtagcagatcagcaacgagcagccaagcggcgtcttcatttaattgatctgcctgctaaattgcatgatgttaatttaagtgatattgaggttacaaatgatcgccagcaagctttaaccctgatttatgattttttgaaaaagtacaaagctgatcctcaccaacaaggcctttatttgtcgggcgactttgggatcgggaagacctatatgctagcgggacttgcaaactatgtagcaactaattttgatcggaatgttgtatttttacatgttccaacttttattgcaggtttatcaagtcattttggtgataacagcttgcaagatgagatcaggaatttagctgaatgcgatgtcttaattttggatgacattggggcagaaacattaagtcagtggtcacgtgatgacgttttaggagtaattttacaggcaagaatggataatgttttgccaacctttttctcttctaatttagatatggaagcattagagtcacactttgaggaaacccgtaatgcaactgatccagttaaagctaaaagattaatgcaacgagtacgttttttagctaaagaagtagtagtttccggtcccgatcgacgaaatttttcgcattaatttcaaaaagttcttgcatcgttcactttgatgcgtataattgaagttaattaaacgagacatgatgatgttcggctcagagagaaggacctagttctggaagttcttcattagaaaatcaccccaatcgtttattcccaaaattgaattttaagaggctggatacctttatcaatctatacgagaggttagacgtacgctaacctgaattttgggtggaaccacgcaattaacacgtcccagtgcttttattagcactgggatttttttattggaggtaaaaatatgagtttttcaattactttgccagacggttcaaagaaagattttgataaggctgtttcagttaaggaagtagcttcatcaatcgctacatctcttggaaaagctgccgttggtgctaaagtaaatggcgttgttaagccacttgattatgaaattgacaatgatgttgaagttgctattcttactgacaaggatgaagaaggcttagacattttaagagctactgctgcttttgcacttgaagcagttgctaagaacaagtacccagaacttcgtttgggtcaacatgttgctgatgaaggcggcttttacgtagatactgacaaagatgaccaaattaaggttactgaattgccagaacttgaaaaggctatggaaaaattagttaagagtggtcaagcaattgaacatgttgtaatggacaagtcagaacttgaagatattttcaaggatgacccttacaagactgatcttttgaagaaaattgatgctgacaaggttgatgcttacaagttaggtgatttcgttgactttggctttgatgctttattgccaaacactggtaagattaagcacttcaagcttttgtcagttgctggtgcttactggcttggtaaatcatccaacccaatgcttcaaagaatcttcggtactgctttcttcaaggaagctgctttaaaggaagatttgaagcgtcgtgcagaaattaaggaacgcgaccacagaactatcggtcgtgaccttgacctcttcttcgttgatcctaaggttggtgctggtcttccttactggatgccaaagggtgctactattcgtcgtgttgttgaacgctatatcatcgaccgtgaagttgctgacggttatcaacatgtttatactccagtattaatgaaccttgatgcttacaagacttcaggtcactgggcacactaccgtgatgacatgttcccaccaatggacatgggtgatggcgaaatgcttgaacttcgtccaatgaactgtccttcacatattcaaatttataagcaccacattcgttcataccgtgacttgccacttcgtgttgctgaacttggtatgatgcacagatatgaaaagtcaggcgctttgtcaggccttcaacgtgtacgtgaaatgactttgaatgatggccacacttttgttgccttggatcaagttcaaactgaattcgctaagattttgaagttaatcatggacgtatacaaggacttcgatattactgattactacttcagactttcataccgtgatccaaagaatactgacaagtactttgcaaatgacgaaatgtgggaaagaagtcaaaagatgcttaagggtgctatggatgaccttggccttgactatgttgaagctgaaggtgaagcagcattctacggtcctaagcttgatattcaaactaagactgctttgggtaatgacgaaactatgtcaactatccaacttgacttcatgcttccagaaagatttggcttaacttacgttggtcaagatggtgaagaacaccgtccagttatgattcaccgtggtattgttggtactatggaaagattcattgcttaccttactgaaatttacaagggtgcattcccaacttggcttgctccagttcaagttgaaattatcccagttaaccttgatgctcatggtgaatatgcagaaaaggttcgtcaagaacttgctaagcgtggcttcagagcagaagttgatactcgtaacgaaaagatgggttacaagattcgtgaatcacaaacccaaaaggtaccttacactttggtgttaggtgacgaagaaatgaagaacggtagcgtaaacgtacgtcgttacggtactgacgaagaaatttctaagagccttactgattttattaatgaaattgatgcagatgttaagtcatactcaagagaaaattaattaatataattaaaaaataaaataaaaaaacgtatgctatgccaggtctaattaagatggctttattgcatacgtttttttggtaaagctaatgtaattgatttttacgtttgtaagtaagaagtaaaagaattgtcatcccctttaacttttatgaaatattttaatgaaataatgaaaataggagttatataaggaaaggtgataaacttgaaaaataagctcattatatttatgacaactgcgctattcatgttagctattattgtaatgggtcaaaatagagtagatgctgcatcctggggagctaagaatttatttactacaccaaaggaaactcgcggaacatggtactataagcaagaaggcaaaataaagaagcttaaaattacaacgcatacatttaataaaatcaaattatataaaatgttgagcagtaatcaagcgattaagtggactaaaaaattagctaaaactgataaaaagtcggggtataaattagctcaaaaagttggtacctctcaatacgaagctactgattttaaattttataaaacagcaggttttgctgccaatggttggctttctagtgatagagctgattcaggacacacttatgttgctataaagaaaaaagataaaagtaataatgataaagtagatacactgcggagactgtaaaatagtttgtgtaaggatgaataattccttaaatttatttctttaaacattagaaaaaggggttcctttctcgtatgattggtttgaacaaaaaaacacatacagaaagaagaactccttcatgaatgattttaccaaaaatatagcacaagctctattcaatccagacaaaataaacgatttattgcgcaaagagctacaacaggctgttaataacttgctagaagctgaattgactgcctttctgggctatgatccctatgccagaaatggctggaatactggcaattctagaaatggtgcttatttccgcaaggttgatacccagtttggaccaattgaagtgcaagtgcctcgagatcgcaacagccagtttcatcagcacacgctgcctgactacaagcagcactctgatgttttggaaagcacgattatcaagctctactccaaaggcgtaactaccagagaaatcgctgacttgattgagaaaatgtatggcagtcattatagtccagcccaagtatcaaatatttccaagcagatgctccccaaggttgaggcttatcacaagcgcaagctaagcgacaagtttttctgtgtctatttggatgcgacataccttcctttgcgccgagaaacgtttgagcgtgaagcagtctatattgccattggcattaaacctaatggacataaagaagtcattgactactgcattgcgcctagtgagaacattgaagtctggacagagatgcttcaaaacatgaagtccagaggcttgaagcaagttgagctctttctttctgatggtgttgttggcatgaaagcggccttgaccaggacttatcctaaagctcattttcaacgctgcctggttcatgtcatgcgcaatatctgtgctaaagtctgggtggatgaccgcgaaaagatcatgaacgaattcaagcagatacatcaacagacaagccaaaaagaagctgcagctgtcttgcatgaattttatgcaaaatggaataaagcttatagccatgttatcaaaggtttgagggaaattgagcccgatctgctggtcttctacaattatcccaaacaaatcagagcttcaatttattcaaccaacatgattgaatcctttaacaacgtcatcaagcgtaaagctaagcctaaggcagaatttccaactgaacagtcgcttgatgtatttattggcatccaggcaatgagctacaatgaccgctatttcaaccgaattcataaaggctttggtcaggttcaggacaccttagaatcctactttgattaaataaataattaaaaaatcaatttacgagaaagatctatttacacaaaagatttgacagtttcgcactgcgagtaggaaatggagcagataattcatttttatattattgttataagagcaaaaaattaatcaaataagttacccggatttaaaattgaagtgcaacactaattgttaaacaaaaaggccatgaagacctaaacttgaagtgaccaaaaatcaagaaaggaagatcttcatgaccaactcaaattctagcatttccaagcattatcatcaattgaacagcgaacaacgtggacaaattcaagctctgcttgattctggcataacctcctgcactgctatcgctcaagaagtaggctgtcataaatcaactatcagccgtgaaattagacgaggcagtgtcctgcaaagagacagcagctatgtcttgtatgagcactattacgctgatactgcacaaatttatcatgaaaagcgccgcagaaactgctataagtgtaatccactgcaacactatgccgtctttttcagaatgctaagcagacgctttaaagccaaatttgatgccactagcattgatgaattcgttggtgaatttcacaggattatgccaaattatccatgtcctagcacgcccactgtctatcgttatattgatcaaggattgctggatataagcaatatcgacctgccaatgaagcttaaaagacgcagaaacaaacgccatcatagtcatggtggccatgctccgcataaaaagaatcttggcaattcgattgaacagcggcctaaagaagttgaaaacagaaaagttcccctgcactgggaaggcgatttggttaaaggcgtcagacgtaaaaatcaacctgccttaatgacactgactgaaagaaccactcgttttgaggttgttatcaaaattcctgactatcgggccagtacttgtcaaagactgcttcaaaaggagattgacagacatcctaattggtttaaatcaattacgtttgacaatggttctgagtttgcggatatgaccaaaatcaaaggatgtcagatctactttgctcatccatattctccttgggaaagaggcacaaatgagaactgcaatggacttctgcgtcaattcttccctaagggcaaaagcatgaaagataagtcagctgcttatgttcaacaggcaactgatgccattaaccgcaaacatcgtcgaatcctccaatatcacacagcagaagaactcttcaagcaatacgttccttcatagcctaactgttgcacttaatttgacaattcaggatcaaataagttataataattttattgatgtgttcaactacatttttatatttttgcactgaaatcttaattcagtgcttttttcataaggattagactaaataagatgataatacgccagcgaaaaaattatttaacttctcaatttttatctaagattagtgccgatgggactttaaatattgaaaatttaattgtcctgacttgtgcaatttttattgcaagtattggactaaatgttaattcaacagctactattattggcgcaatgttgatttctcctctgatgggaccactactagcaattggcacaggtcttgctttatatgatgttcacttactgcgtaaaggaacaatttcattattagcagaaattattatcagtttagctgcatctacaatttattttcatttttctcctttgacttatgctagtcaagagattattgcacgaacttcaccaacaatctgggatgcgatgattgcgttttttggaggggtcgctggaataatcggagctcgcaaaaaagaagcaaataatattgtacctggtgtagcgattgcaacagccttaatgccaccggcttgtacgatagggtattcaattgcggcaggtaatcttaaatattttttaggatcaagctatttatttttgattaactgtgttttcataattttgactgcattcatgggtgtaaaaattatgaagtggttaagttattctactaagcaatctaagttgtttttcttgcacaagccgacctttaaagagtttgtgataattttagtagtaattattttaattattcctagtatcttgtcagctaatcagatggtgaataaaactctagtagatcaaaatgttcaaaatcttgttgttaatgaattaggcaatgttaatttaattaaggaaaatgttgatacgcaaggaaaaataattaatcttacagtttcaggcgataaaattaacgctaagaaaattcaagcggctaaagcaaacttaacaaaatatgacctgaaaggctattcactgaatattgtacaagtagctcaggttaatcccaatgcagaaaatcaattagatcgacaagtaaataatattattaatcagcgtcagcatgaacaagaacaagctgatgaaaaacgtcaacaagaacaagaaaaacgtaatcaaaaaattcgcaaactgtcatctgcaatatcttctgttactgcagttagtgataataaaaataagcaaattactttgatagagttaaaaaagccgctatctaagaagagaaaaaacgccttagtaagacaaataaaagataaatatccaaatattaatttagtggaatttgttcaagaaaatattaaaaattagaagaaactgtcaaattttttgtgtaaatagatttttctcgtagattgattttttaatcttttatttaatcaaagtagaattctaaggtatcctgaacctgaccaaagcctttgtggattcgattgaaatagcgttcgttgtagctcattgcttgaatgccaataaaagtatcaagcgactgttcatttgaaaactctgctttaggtttagctttacgcttgataacgttgttaaaggattcgatcatattggtggagtaaattgaaaccctgatctgcttaggatagctgtaaaagaccagcagatcaggttcaatctctttgagatttctgatgacatggttgtacgctctgttccacttgtcatagaaggcgtgcaagattttgatcgcagcttctttatttggctgttgatggatttgcttgaattcattcatgatattttcgcgatcatctacgcgtactttagcgcagatattgcgcatgacatgtaccagacagcgttgaaaatgagctttgggatatgtcttttccagtaccgtcttcatgcccacaacgccatctgaaagaaagagctcaacctgttctagaccgcgagacttcatgtcttgaagcatttccgtccaattctcgacgttttcgctgggagcaatgcggttaatcgatgacttccttgtggccattaggcttgatgccaatggcaatatagactgcttcacgctcaaaggttatgcgacgcaaagtaatgtaagttgcgtccaaataaatacagaagaacttatcgctaagcttgcgttgatgataggcttcaacttttggaatcatctgcttggagatgttagatacctgagctgggctgtagtgactgccgtacatcttttcaattaaatcggctatttctctggtggttacgcctttggaatatagcttgataatcatgctttccaagacatcggagtgctgcctgtagtcaggcagcgtgtgctgatgaaacatgccgttgcggtccctaggcacctgaatttcaatctcgccaaattgcgtatcaactttacggaaataagcaccattgcgtgaattgcctgtattccagccagctctggcataaggatcatagcctaaaaacgcagtcagttcagcttccaataagtcattaactgcttgctggagttctttgcgcaataaatcgtttattttgtcttgattgaatagagcttgtgccatatttttggtaaaatcattcatgaaggagttcttctttccgtatgtgttttttgttcaaaccaatcatacgagaaaggaactcctttttctaatgtttaaagaaataaatttaaggaatcattcatccttacacaaactattttacggtctcattatatctgtatattaatgcacaaatgctgttatatcaacgattagatacttcgctttataataaacagtgttattataaagatgccgagagggatagaggcaataaagaattagaatcgaaaggtgatatatatgttagatgttttaaataacaaagtagaattaagcaacgtacattttgcagaacacaaattagcaattgaagatgctaaaacaatgttagaaaacgaaggttggattgctactaagtaaaaagtgttgataattatgaaattaaaaacagaaaatgagacgcacgataaagtacctcataactgctataaattagctagtagttatgagtcgttttttattttttgcttgttatctattgatttgtagctaattctatatgacaatgatatctaaattattgaactataataaaaatccgttattttaatttggtctaagttgctatatattcaaaaaaatcgttaaatttttattatttatttggcggaatatgatatgaagaaacgtttcaaattagctgctatttttgtggctgcaatgttcgcagccgcacccgttgttggtatggcagaaacatcaactactgtttcagctgatgctgacatcatgcaacaatacacttttaatgactcagttttggactttactcctactttaaaggtttatattgctaagggtcacaaatttaccaccagtaaagaaactgcttacaaggcaaaataattaggattgattccgaaaatatagagctgttagatttaccgtggtctagcagcttttttgatgcaaaaaaataccactcaccgttaaatttagaccattcacctgaatttaataatttaacgaaaataagcaggtatactaataatcaatcaaggagggatgcaattgaaagttaaattgaatatcgatccaagtttaccagaagaaaaagctgaattttggttaaagaaaatgactgctagatttgaacggattactaaagagttgaattcggagcaggattttctttggtgctatctagatggggatgcctatgaaattaatttttctcaaatctatgcaattcaaatagaaaatgaaaaaacaatgatttgtactcaaaatcaaaaatatgtttataggggcagattgtatcaagtacaaagtgttctacctaacgattttataatgatttctagaggtgctattgttaattatcattttattgatcatctagaaattataaatacaggcaatattgatgcgcttttggagaatggactaagagtacaagtttctcgtagaagaataaaggatttaaaagagaggctaggattatgaaaaatattaaagatcttttatataacggtctgattagtggactgattggtattggtatcggtacgatctggatggctatggacttcttgttttcactaaatggtcaaaatcctgcaacagcgaagatatatttgaaaacctttcttttttggacgattatttcttttctcattggtattttcttttatctagctagctggatttttaatagtgaaaaatggtcattgaaaaaacaaatttttattaatttcttcgtctgttttgttgcctggttcttgttaaacctcctaattgataattttagtatttcactaaagatggttattagagtaacagttgattttattattatgtacgctattgcatacggtggatattttttacatttatggaacactgttagacgaataaatgcaaagttaaaggaaaaatagaataccataattaaaaaatgaaagaggtacccttgcatgactttattatctgtaaataatatttcaaaaacatatcaaaaagcacataaaaaggcggtatctgatgtttcatttaatgttgatagtggtgatattgttgccttcttaggtcctaatggtgcaggaaaaactacaacattaaaaatgattcttaatttagttagtcctgataaaggaacggttgtattcgacggaaaagatgtaactcacaacaatctctttttattgaaaaacactggcgttttattagaaggatctagaaatatgtattgggccttatcaccaatggaaaattttgtttattggggtggccaacgtggtttaagcaagaaagaggcagaaaaaagaggagaaactttcctcaaacagtttggtctgttggataagaaatacacctctattaccagattgagtagaggtatgcagcaagttgtgggaatttgctgtgctatgattgccgaaccaaagcttttaattttagatgagccaactttaggtttggatcttaatgctactcaaataatgattaagagtctgaatatgttatccgccaatggagtagggattctagttactacacatcaaatggaatttgctcaagagatagctaataaaattttattaatcaatcatggtaaacttgtcttttctaatagtataaaagatagtttgaagaagctgaataaacaagaaatttttgaagtgcatttcacccaagaacttaccgcctcagaaaaagaggatatacttgcaagctgtgaacttacaaagaagactgacggagtttatcgtttgggtgttaaaccgcaagcatctctttcacaagtacttaaattattgagtgaattaccaataagtagtatacaaactgtgactagaggattagatgaaatttttaagtactacacggagaaggaaaaatgataagttttaaagctgaattttggcgtcaattctatttatataagagatacctcttcaattatatttcagaatttttcttattaattttaatgtttatggctattttttggggcggtagccttgtaggaggtggcgttttaggaaaatcattgaatgccctagtagttggctatgttttgtggagtttaattgaaaacactattagccaaatgggctaagtgtataattttttacggtaagttgaataaataattaaaaaagcccaagtcctttgaatttggacttgagctcaaacaaaaagaccagtagtctgatgttaagaacaaaaaacacattagaagctggtcttttatgaattcaattgtaactgaaatcgcaaatattataaagtctgaagataattatattaagcgtgaaagaaaaataatctgtttcttcttaaacctgattaaggaaatcatggccttggctttagctaaagttgatgatgaaatgattaccaaggttaaagcacagggctatcagattgataagaagaatgagcgctcaatcaatatggcttttggcgaagttaggtatgtcagaagaagatatgtctgcccaggcaaacaagcaaggtatcccttggatgaattaatgggctttgacaaatacaagcgctacagtattttagcagtcaaaaacatcttagaagtaagcagcgttgccacttatcgcaatactgctctagcagtcaattgcctgtctggctttaatattagccatatgcaggtgggcaatttggtaaaaatggccgggaaaaatattaaagcgggccaagaagcagattcaagatatgatgccgcaggcactaagaaaaaggtcccagttttgtatcttgaaggcgatggcgtggtgatcaaaggcactaaaagccggttggaatttcatcgctatcaggtctgtgaaggcattgtcaatataagcaagaaacgcagaaagcgaatcaatgccaaggaatttgtttctttaagccgacttgatgcgctgaacgaagccaaggagtacctggccaatacttatgatctttctgatactgtaattcttagcaacgccgatggcggtgctggatatgccaaaacagacttcgatgacattgtagggctatgcaagcgtcatgagcatttcttggatgtctttcacctaaataagaaaatcaaagaaaggctatattttgcgcctgacctgcaaggcaagctgatttctgctttggaatacaaatacagctatgacaaagttaaaactatcctaaccactgcagaaagccgactaattgatgaattgaataccgagctcaatcatgattatctggggcgcctaaggaattatattgatcgtcattgggacgatattaagccgtttaagaaacgaaaactgactgtgactaaagccattggctgctgcgagagcaaccaccgcaagtatacctaccgtgttaaggggcaaggcaagaaatggtcaaaatctggagcagaaggcatgcttaggatcttaagctgcatcaagaatcgagagctggaattttggcttagcagcgagtttgaagattcagaaataactgtattgactgaacaggaattaaaagcagcggcccgtgacagcttaaagaagcgtcatgaagttcatttaggcatccagcatggcgcattaaccgcacaggtagctggcaatagttatttaagcaagctaagcagaaatttaagtcatataaatatttaagaaattaaggttagactaatggtttaaaggctaccgcaaaaacattgacacttacccaaatgggatcaacagtgatgaataatgccaaaagtggtattttagaacaacaatatcttatgccaatttcttctagaagattatttttaaataaaagtattgcaaatattgttgtggcattcgtccaagcaattttaattctgatagcagtaatggcaatttctgatcactggattagttttccagtaataatgattgttccatttatattagctttactaactacagtgggattaggctatttaattgttagcttagttttacgttttaaaagaattggcagtaccttagtgatttttcaatatatttacttaggtatactactagttaattttgaaaactactccaatcttacaaaatgcttatcttgtttattgccaatttgtccaatggttagttggatgagattagcagttaacaatcgaccatacaatttagcgttttatttaagcgaatctatctttaataccgtattatggttgattattggattgctagtatttaatttagctgataaatatgtaaagaaaaatgggactttatctttttattgattttagttgctaataaattcattcatccctgaaaagtgattcttgcccacaaaaatttcaaggaataacttctacttatgcattgttctgtggtaggaacgctgtaaagtttgtgtctgcagcttgggtaaataataacgatcttcatgtttaaaaatagggcaaaaattgctctatttttagctcccattagaattttccgtggcataattgacgtataaatttgaaagggagatataaaaaatgaagaaaaaagttttatcatttattgccgcttttttagttgttttaggtttggctagcgttcatgcaaacacagcaaatgctgctagttagggtgctaccaaacttttcaccacacctaagaatacgcgtggtgtttggtaacacaaagaagctggtaaagttattagaactaaaattactgcacatactattaacggcctcaaggtttataaggtattaaagggtaaagaagcagataagtgggataaaaagttaactgctgccgatgaaaaggctaactacaaattagctgacaaagtttctagctcacaatttgaagcttatacctttaaattccacggtattacggatttcaacgcaaacggctggcttgctggtagcggcgacggctactactatgctcctatgaagaagaccgttaagggtaagaaagttaatgctttgcgtgtcggcggcggtgctggcaactactttatcagctacgcttacaaggataagaaattagcgtaaattgcaataataaattgaacacttaagctgcttgatagattttgtctaattctctttcaaagatttcatctggtgtgtgatatgccaatagttttcttggcaatgaattacaccaggtttcaatatcaatgatttcttgaagagaatagttattgatgtagtcacctttaggaatgaatctgcgaataaggccattgtgtctttcaacagtgcctttatcacaagaagtatacggatgagcgtaatagactaaagtgttagatactttctctaagttggatagatccgcaaactctgagccattgtcagttgtaatcgttttaaaaatttcattccagtgtttctatattgactgtgcaaggattgaaaagctgacattacactgttagccgttttatccggaatacgtatgatcaagaactctcgactcattcgttcagacaaagttagcagcacttgatcgtctctagtcttatgtcctaagactaggtcacattcccagtggccaaactcttttcggtcttaaatcactttagggcgctcttcaatgcttcgacctagtttctttttgtttttacggacacgatgaattttaatgttacgctttaatttttcgggtaaatcagagtttctgatagccaacaagccttggtctacatagttatacaacgttctagtacagactgtttattcgctgctaaattttcctatagccagacagcgattggcgcatacatcaagcgaccaattattttcaaagaagtgcttaatgacatacttaataaagtcattcttctttaagaaatctgacttgcgaccgcagcggtgacgatccaagtggtaaacttcattaccatgttttgctttatatcgcttttgcttgccattataaagcaaaactgtgccacgcttaacttcataactgatcgtagaaggagaacagccaatttcacgggcaatagctctaagagagaagccatccttgatacgagtttaaataataactcgctcttctagtgataaatactttcccttttcgtgcttaggcatgatagaatgtaaagagtccatttgtgacctcgtttctgaatgttttgtggtaattacattttatcaaacaggtccaaatggactttttatttttctaaagtgttcaatttgattttacaatcggcgaaatagaaaatatgttaattcataagaaaattatttttcaaataaaggcactttcttttgtgatttaacttcaaaaagacctttatcagagatttttagactaggagaaacaagtaaagacaaagtagagaaagacataatttcgtttgtatttttatagcccaattctacgagatttttacgtatattaccaatttgttctcctaaaatcttcattggttgattgcttacaactccaccaattggaagaggagcattggctgcaatcttttcacctctggcgactatataaccaccttgctgattaattaattgatgttgaatgtcaatcatgccatctatatttgttcccattaccatcaaattatggtgatcgtgagcccaggttgcccctacagcaccatcaccaataatgccacgatcaactaggcctaagctaaatttaccatcatttaaaccatatctttcttggacaataattaaagctaaatttgcactttgccaatcaacgatatgattatgtacagctagccttttttgaatatgatttgtaaaagtaccgacaggatttatttgaatgacatttgctgtaactgagccattatcaacaagatttgttttaagtaataggtcttgtttagttaatttaggagctttcacactagtagttagactattaggtgaaaaatcatcttgagaagtatttttgatagtctcttttgcggatattccatttttatagacatcagctattgagagttcttctaaattatccagaatggagaaatcagcaactcttcctggtgcaattgcaccacgatcccataatcccatatgtcttgcaggaatataggtagaaatataaatggcgtcttctggcttcatccccatattgattgcttttttaactaataaatttaagtgaccttttaacaaagtatcaggcattgaatcatcagtaactaaggctacatgttcaaaatatttattatcaataatagtattgatgacatctggatgcatggattttaattgaacttcaacaaacatcccgtttcttatcttttcattgactaaatctctagtttgttgagtatgatcagtagtaacaccggcatataaaattttagctaaatcttcaccatgataagcaggggtatggccttcaattggcatagtaggtttagttttatgacaagtattaattatgtccttaattagagtgtccttgtcagaagtcatatctttaaagttcatgacttcacctaagcaaataaagcgtggatctttaagtaattcttttacttcaggcacaccaattttaccgccagttgtttccatttgaggattggttgaaggaacagaagaagggatgccgaagaaaatatcaattggcgaatcttcattaatgaaatcttttaatccattaataccggcgacattagtaacctcatgatcatcagcaataatagtagtcgtgccatattttagaattgtttcacccattattttaggtgtagtcattgagctatcaatatgcatatgggcatctacaaaaccagggattaaatatttaccttgtagatcgatgactttttttgcttttaaattaggtaattctttattaatccaatagaatttgccatttttaatacttacttgaacatcttgaaattttcgtaaatatacattaaaaacatgagcatttttgataattaagtctacctcagtcatttaaaatcctccataaaagataaggagctgaatctacaattcagctccttatagggaataaacatcaattatttattcataatcttattccatcttgaaatccagttagacatatgtgaatttacaaagaagaaattaatagtttttgctcttttagcaactgagccataagttttgtttgctgcttctgcaggtgttaatttaacttgagtgtttacaggagcgttgttcaaagatttaagacctgctactttcttttgaattttttcgcttaatctaaagttgatgtatttgtatgcagctgctgaatttttactattctttaaaatagagacattatcgtagttagcatatgtaccagacttaggaacgatgtattttaagtttggattagttgcttgaagcataccaacagcataatcaccaactacagcagcttcaatttcaccagatttaaacatgttacttaaatctgaactttgggtgtaagttttgacaacattaggttttaattctttcattgccttaaatgctgcatttccgttgtctttagttacactagtaccagcatagtcaccagcaatatataacattgcggggccaaaagtagttgtcatatcaggtacagcaatcttatttttaagtttagatgaccataagtccttccaagaattaatattaactttctttggattatagataatacccaaactgtttacggtataaggaactgtattagtttctttagctagtttttgttctgattttgataaatatttgaaattggaaatcttagagaagtctaacttcttaaataacttctttttatcgccagtaacagcattgttttgagcaagttcaattacatcaacacctgtattagggttatgttcaatttgagtaagtcttgttgcactatcaccaaattgagtttttactttaactgatgattgtttagcaaaaggatttaaaacatcgttccgcatttgtttggtagataaaccaaaggttgaaacagttaaatttcctccgttagaagatgattgtgatgaacatgcagttgtaccaaatgcaactgaaccaactaataaaaaaattgcagctaataaaccaacttttttaaaattcatttttattcctttctttacaattggttatctagacaacggatgaagatgcttggagggcaaataaagctgaactttatctcctgagctacgcatcgatttcctagactcttcaacagtgaagtctccgagactagtacttaccttatatttaaagctctgacctaaatactcaagactagtgattgttccatcaatcaaattattagacggattttcttctgaattaatcaaaatattttcgggtctaatagttaataccttagcttgaatattattttcatcagttaagaaaacaagatctttacttttaatttggcgatcattaataatttcatcaacattgatgaaattatcataaccgatgaatctagcaacatattctgaactagggtggtgaaagatgttttcaggagtatcatattgatcaattttgccatctttcatgattaatactttatcggaaatagcgaagcattctctttgatcatgagtaacaaaaagaactgtcatttttagcttttgctgcaattctctaatttcgctacgcattttaattcttaattttgcgtctaaattactcaagggttcatccattagtaataattgtggattgactaccaatgcacgtgctaaagaaactctttgttgttgaccaccagataattctttaggatagcgagaagctaatttagacaagccggttatttttaaaatttgatcgactcttttttgaatgtcacttttagacatctttttcatttttaatccgaaagctacattattaaagacggtcatatgtgggaataaagcgtaactttggaaaaccattccaaagtttcttttgtaaactggtacttttccaacatcttcaccatcaactaaaacttgtccgtctgttgctggaattaaacctgctatgattcttaaagtggttgttttaccgcaacctgagggtcctagaatagatactaaatcaccgttttttacggaaaacgaaatatcttttaatactttggttttaccgttatatgattttgctaaatcttttacttctaaaattgccaatttaattgttcctatcagtaagtttatttagaccaactagtttttcagttaaaagcataattaatgctgtaaaaatcattagaactacagaaatagcagaaacagttggatcatagttgttttgtaaatagttcaaaattgctggtggcagcattgtaattgatggtccattcatgaacaatgaaattggaatattattaaatgaattaataaaacacatcataaaggctgctacaatacttgctttaatgttaggtaaaacgattaagaagaatcctttctgaggtgaacatccacaaacccaagctgcttcttcaatatttttatccattagtaacatacttgctgtaactagtcttattacataaggtaggcataataaaaagtgaccaataattagactaggcataacaggtagtctaagagtaacgacagcagcttgatataaggcaaagccaattacaatttctggaattagagtagggcttaagaagaaagagtgaaaccaagacttatgaacgatgttgaatcttgttaaagcataaactgcagggataccaattattaatgccgaaagactagcaataatggcaacgaacaaacttgattcaaatccactgataaaatctggttgctgaaaaatattggcataccaggataaagtaaaacctttaattggtagagaaattgaatcctgattattaaatgaagtaataattactaaaagtaggaaactgtcaaatcttttgtgtaaatagatctttctcgtaaattgattttttaattatttatttaatcaaagtaggattctaaggtgtcctgaacctgaccaaagcctttatgaattcgattgaaataacggtcattgtagctcattgcctgaatgccaataaaagcatcaagcgactgttcagttggaaactctgccttaggcttagctttgcgcttgatcacattgttaaatgattcaatcatgttagtcgaataaattgaagctctgatctgcttgggatagttataaaagaccagcagatctggttctatgtctttcaagcttctgataacatggctgtaaaccttgccccatttggtatagaagtcatgcaggacagctgtggcttcttctttgtttgtctgttgatgcacctgtttgaattcgttcatgatcttttcacgatcgtcgacgcgtactttagcgcagatattgcgcatgacatgaaccaaacagcgttgaaaatgagctttaggataagtcctggccaaggctgttttcatgccaacaacaccatcagaaagaaaaagctcaacttgctttaagcctcgggatttcatgttttgaagcatatctgtccagacttcaatgttctcgctaggtgcaatgcagtagtcaatgacctccttgtgcccattaggcttgatgccaatggcaatatagactgcttcacgctcaaatgtttctcggcgcaaaggaaggtatgtcgcatccaaatagacgcagaaaaacttgtcgcttagcttgcgtttgtggtaagcctcaacctttggaatcatctgcttggaaatatttgatacctgagctggactgtaatggctgccatacatcttttcaattagatcggctatttccctggtggtcacgcccttggagtaaagcttgataatcatgctttccaagatatccgagtgctgcttgtagccaggcagcgtgtgctgatgaaattgaccgttgcgatcccgaggcacttgcacttcaattgggccaaattgcgtatcaactttgcggaaataagcaccatttctagagttgccagtattccagccatttctggcatagggatcatagcccagaaaggcagtcaattcagcttctaacaagttattaacagcctgttgtagctctttgcgcaataaatcatttattttgtctggattgaatagagcttgagcaaaatctttggtaaaatcattcatgaaggagttcttctttctgtatgtgtttttttgttcaaaccaatcatacgagaaaggaactcctttttctaatgtttaaagaaataaatttaaggaatcattcatccttacacaaactattttacagtctctatccaaagcgcgacttgcttttctcattaatatcattgataaagcagagataataatcagaactattgcaataacacttgcatttttccagttacctaatgtcatggcttgttggtaaatcaaggtagacattactaaatttttattacctcccaaaatttgtggggtagtatatgctgtcatcgcacctgcaaagaccaaaatgcatcctgttaaaatccctgagactaattgtggtattacaatttttatcaaattaacccatggattggcgcctaatacagcagcagcttcttctgcttcaatgtttagctcagaaatactaccaactaatgaaataatcataatcgggagaaataaataagctgaaccgatgataattgccgtatcagtataaagaatgtttaatggagaattaattaaatgaatagacatcagaaatttatttagaataccgttacgacctaaaataatgatccatgcaaagtttctgacaactgcattcgttaacattggaaaaagaatgataattgttaaaattgatcttactttgctcttttgacgagcaatccaaagtgaaattggaattccaagaattaaaacaatgatcatagtgagtaaagcaattttaaatgttctaccaattacatgaagattgtacgtgttttttagaaattcagtgtataggtgcaaaaatcctttagaatcttgaaatgttggtatagcaatctgaattaatggaaagaatgcaaaaatcaagacactaataaatgccggaaatagcagccaaaaactggattttattttcatattgttcgtattcctccttatcttgtcttagaataatttaaatgtaaaaataagtcaatacaaaatatgaattaaaataataacatttgtgttaattgtatgcgtattgtattatttatgaatataaatagatttatttataaatttatcttcttgaaaatacgaacattaccaaaaaggaagtggagttcttaatgaaaaagccagttattattagtacagatccaggaatagatgacgcagttgcattagcaatatgtcttttttcgcctgcaattgaagttaaaagtattattgcaactaatggcaatgttaatgcgcaacaagctttaataaatatattgaaattggagaaatttttcggtaaaagtattcctgtagtaaaaggggtagagcgttcattagtccaacaatctattcgagctaaagaaatacatggtaaatcaggaatggacggatatgattttccaaatcctagttttgaattggtggatcatggcatatcaccggttgccatacataaaatagttgcagcttcttctgaaaaagtaactcttattggaattgcaccacttactgattacgctctatatgttcgtttatacccagatgatataaaaaatattaaggaactaattattatgggcggagcaatgggtagaggtaattatggtatctattctgaattcaatattgcatctgatcctgaagctgcaaaaatcatttttgaaagtggattaaaaattagagtagcgcctttagaattaggtgcacaagctaaaattatgcctgaagtaagtaatcaaatacgacagttaggaaaagctggtgatatgttttacgacttatttaagaaatttcgaggtggcagttttcaaactggccttaaaatttatgatgcacttgcagcaggcgtacttttaaatccgcaaatgtttaaatttaaaaatacacatgtagaaattgatgttcaaaccggttatacatatggtgcttcattgatggattttaaaaataagctagatcttccaaataatgctgaaatagcagtgtctgtagatccagaaattttttctaaatggtttgtagaagctttatcaaaaacaagataaaaaagtcaattaattgtcaacaattaattgacggataatggttaagcgagtatactactactagttgagaacaagaagaagcacccgcttctcgcctaagttaagtaaacctctaggctgattgataatttctgttgattaaaggcgggtatgattcttataacccgcctttttcttgtcctcaaattaacacggaggtgaacagttataccaagaagtttaatcttaaacgacagaattcgcgctcgcgaagttcgtttaattgatgaagatggtcagcaagttggtgtgatgagtaaaagtgatgccttacgtcgtgcaagcgatgcaggtcttgacttagctctgatttctccaaatgctaagccacctgtagcacgtatcatggattacgggaagtaccgctttgaacaacaaaagaagcttaaggaagcccgtaagaattccaagacagtcagtgtcaaagaaattcgtttgagtccaactattgaaggtaacgacttcgaaactaaacttaagcacgttcgtaagttcatttctaaagaaggagctaaggttcgcgtctcaattcgttttagaggtcgtgccatcactcacaaggaattaggtcaacaagtacttgaaaaaatggccgaagtaacctcagacattgctaatgtaattagtaagcctaagatggaaggtcgttcaatgttcttgatgcttgcacctaagagtgataaggacaaaaagaaaaagtagttaattggaggaaatagaaatatgccaaagatgaaaacacaccgcgcttctgctaagcgttttaagagaactgcaaatggtggtttaaagcgtcaccacgcatttactggtcaccgtttccacggtaagacaaagaagcaacgtcgtcacttgagaaaagctgctatggtttcaaagagtgatatgaagcgtatcaagcaaatggttgctcaaatgcactaatacttgttcttaattaagacagactatagtaggaggaattttaaatgccaagagttaaaggtggaacagtaacacgtcaacgtcgtaagaagatcatgaagcttgccaagggttaccgtggcgcaaagcacatgcaatttaaggctgcaagcactcaattattcgtttcatacaagtacgcattccgcgaccgtagaagacgtaagagtgaattcagaaagttatggattgctcgtattaacgcagctgcaagacaaaacgacatctcatattctaagttaatgcacggcttgaagttggctggtgttgacatgaaccgtaagatgttagctgatattgcttacaacgactcaaagacttttgcacaattagcagaaactgctaagaaagctttgaactaataacaaaagaaataagctagggaaattttcctagcttatttttttatctatttttgaattaatgctcgtaatctaattttttcatctggcgtagtaaaggccgcgtcaaccgcgttgagataaagagtggtttcttcttcaggagtcaaggcggtcttttcttcaagcagttggtattcatgcggtaaattggtattggaaacgatcatatcatcagaatttagcgtgactttcattcccatgtgcaataatttttttattgggtaagaatcaatctgatcaaaagctttggtgttcatatttgaagtggcgcaacattccaatatgatttggtgatcaatcagatattgggtaagtgctggatcttcagtgcagcgaatgccatggccgatccgtttcgcgccaatttttaatgcttgacggattgaatcaggtcccgcagcctcaccagcatggatggtataaggaaggtgtaattcttgggcacgattgaaaaaatgctggtagttaatgttagggatcgggccttccgcaccagctaggtcaaggccaacaacgccatgacctaaaaattctttcgctagctcaaccgtttccatgttttctttttcattgtgggcgaagcgcatcaaacagagaattaaaccagcgtgtaattcaggctgatctttgtctgctttttgtttttgataaaacttcgtaataccgctgactgctgcagcgattacttgtctttgcgttaaaccatttttagtatgtaattgcggtgcaaagcggatctcggcgtagactagaccttgttgttttaattcgcaaagaagatcaaacacaatcatctccagatcatgctttgtcttcattaactggttaggtaagtcaaacttttccaaaaattgttccaagctagcgcaagaattatcaactgacaattcttgccgcaatttttgatcagttaactgtggcatgtgatgttcctgcattaacttcttaacagtagcaactgggacagaaccgtcgaggtgaaggtgtaaatcgatgaattttctcatggtgatcctttctgttgattgatgattttgcttaaattgtttagtattgtaacactttttcatcagaaaaaaacaaaaatttctaaagcaaacccatttttgatatgatataaggtgataaaaaatggaggaaattaacagttaaaagatagacaagatacaaagatctgttcagaaatataaaacatagaagcaggtcaaaaactaaaaatttaatattttgttcgcttgtatttatttcactcttttctaaatttatgtttgtattggaggtgaaacaaatgatcaaggctcaagtagtcgaattaaaacctaacaagaccatgcaacaagagctggataagctttgtgattatcgcagatattgctggaatcaagctttagccacttggcaagatatgtatgaagcacgaaccttagataaggataataatcccagtccaaatgagcgcagaatacgtgatgagctagtcgataataaggcagactggcagtttgctctgtctgctagatgcttgcaattagcagtcaaagatttggctaatgcttggaagaatttctttgataaggcacagcctgattttggaaaaccacatttcaaatcaaagaaggccccgcgacaaggctttaagactgaccgggctaaagtggttaatggtaagctacgcttagacaagcccagaggcattaaaacctggttcgatattccaacatatgaagctttaaaaatgaagcaaattaaagttgctagtgtctttagagaaagaggacattattatgccgctctttcttatgaagaagaaactttggtaaagcctagaacaggtagaaagacagctgttgatgttaatgtgggacatttcaactacactgggggcaaaatcaatgttttgccatcaagattgcaaaaactatacaagcgcattaagcattatcagagaatgctggctaagaaaagacgggctaatggcaagttagctggccaaagcaataattacgtgcaagtgagaaccaaactgcaacgtgattatcgtaaagtagccaacattcaaaacgatcttttgcaaaaattcactacaaaattggttaataattatgatcaaatagtgattgaagacttagccgttaaacaaatgatgatgacgcacgtcgcttcaaaaggcatgcagagatcattattcagtaagtttagacagatattgacttataaatgtgagtggtatggcaaagaattaatcttggctgataaaacatatccatcaaccccaagatgtgctaattgtggttatgttaaaaaaggtgatgaaaaaatcactttgcaaggcaaccaaaaacatcacactaagcacaatgagtatgtttgttatgaatgcggttatactaatgatcgtgatgataatgcagtgttaaatcttttagctttagcaaaataatgaaaacggggctggctaagcccttaagctgcaagagttagtcaatgcgattactcctagattggaatattggaatactaatgatgacagcagtaaataaagcgaagaaaggaaggactatatttctttctgatatgtaaaaaatatacattcttctacatatttctatgttttatatagcagtgttgatatgctttttagaccaaaatatacaattgatacgatttacaatctggacccccagaagttgaatgaaatggacattaaggcggttttttcagacctagataatacattgctcgcctggaataaatttgaaactgccaaagaaatggataattttaatcaaaagttagccaaggcgggaatcactctcgtggtcatttctaacaataatgctcaaagagtgggcaaggtacttgatccttaccatatcgaatttgtcgctaagtcacgtaagccattgccatttgcgatcaccaagaagcgcgaagcaatgcatttgcaaaaagatcaggttatgatggttggcgaccaactaatcactgacatgcaagcagggaatttggccggcgtgaagactgttctagttaagccattagttgaaactgataagtggaatacgagaatcaatcgtttctttgaaaaaattatctttttcttcctgggtttatcacatcgagtaacatttaagaaggagctatcaaatggatgaggatattatttgtatcggctgcggtgccaagctgcaatccgatgatcctgaaaaagcaggttatctgccaaaaagtgcactagataaggcaaagcaagaagaaaatgcggatgtttattgtcaacgttgcttcagattgcgccattataacgaaatcatgccagttgatttgaacaacgatgattttttagctttgcttaactctttaggacaaaagaaagctttaattgttaatgtagttgacttatttgatttttcaaattctttgctatcatcattgaagcgttttgttggaaataatgattttattttagttggtaataaatttgatctatttcctaaaaactctaagcaaagtaagattaaggattggatgagacaagaagctaaccgaatggggctttatcctaaggaaatcttcttggtttcagctaaaaagaagttgaacttggaagatttgatcgcttatattaataagcaatcgcaagacaaagatgtctattttgtagggacaactaatgttggtaagtcaactttaatcaatgccattattgacatgatgggtgatattcaagacctgatcaccgcttcacgctttcctggaactactttagacaaaattgaaattcctctagaaaatggtcactttttgattgatacgcccgggatcatgaccgagaatcaattggctacgcacttaaatgctaaggatttggagctggtctcacctaagaagcctttaaagccagctacttaccaattattgcctggtaatactttattcttagctggtttgggacggattgattatctcaagggcgaatcgactagctttactgtttacgttgctcgtggaatgtatattcaccgtactaagacagctaatgcggatgacttttataaaaagcataaaggtgaattgttatccccaccagctgcagatgatgaaatggcaccactaaagggtcaagaatttagaacggaatataagagtgaccttttatttggtggaattggttttgtgactgtacccaagggatgcgttgttaagacttacacaccagatgggattggtttaggtattcgtcgtgcattgatttagaggtttgcatatggttaatccaaaatgtattgaaaaaatgccaactgctaaagttgaagcagaattggaacaagaacaaggtaaaggtcgtcagattgggattatgggtggtacctttaatccggtgcatattgcgcacttggtagcggcagagcaagcaatgactaagttgaagctggatgaggtctggtttattccggataatattccaccgcataaaaatgctccgctgacttctgctaaagatcgggcaacgatgcttgatttagctacgcgcgataatcctaactttagggtaaaactattggaattgttccgaggcggcgtttcttatactgtggatactatgcgttatctcaaggaaaaagcacctcagaatgactattatttgattatgggcagtgatcaggttaacagtttccatacttggaaggaagctccgaccctggctaaactagtaacattggtcggaattcgtcgtccaggttatccacaagatccgcaatatcccatgatttgggttgacgcaccagatattcgcctaagttcgactgctattcgtcgcagtgtcgcaactggcacttcaattcgttacttggtaccagaagccgtcagagaatatattgaagaaaaggggctttaccttgacgaaactaatttttaaaaatacttattcaccattctctagtgaacaaattgttgctaaagaaaaggcaaacatgaagaaaaaacgttttgaacattgtgttcgtgttagtgaaactgcacgtaagttggctaagttaaatggatatgatgaagaaaaagcagccttagctggctttgttcatgattatgccaagcaggtaccggtagaagagtatcgtaaggtaattaaggaacaggattttgatccagatttgcttaattggaatcgtgccatctggcatggcattgtggggattttctttattgaacgtgatttaaaaattagggatcctgagattttaactgccgtacgtcgtcatacgactggtgatactaagatgactacattagataaaattatctttgtagctgattttattgaacccggacgagattttccaggagttgaagaagcgcgcaaagttgcttatgctagtcttgatgaaggggtaggctatgaattgcagcacaccttagagtttttaattgaaaataaaaataaagtatatcctcgtactttagaagcatacaatgtatggggaattaagtaataaaaaggagaaaaatattgactagtcaagaaattttagattttactacccaagcaattagtgaccgtcatggtgaagatactgaagcttacgatatgcgtggaatcagtattttagctgattactatgtcattaccagtgcaggctctaatcgtcaattacatgcgatcgttaactcaattgttgatgcggctcacgaaaacaactacactgactaccgtattgaaggtaccagagattctaactggcttttgctcgatttaggtgatgttgtagtcaacgtctttactaaggaagcacgtgaattttataacttggaaaagctatgggctaacggtaagcaagttgaattgaaggaagattaagcaatgagtgttgttgggattattgcggaatttaatcctttccatagtggacatgagttcttgctaaatcaagcacgcttggttgctggtaatgatccaattgtggtgctcatgtctggtaactacgtgcaacgtggtgagatggcgattatgagcaagtgggagcgggctaaggtggctttgcaatctggtgccgatttggtatttgaaacaccattttcaacggcagtagaaccagctgatctttttgctctcggaaacattgaacaacttgctaaattaggcgtaactgatttagtctttggtgtagaagatgctaacctgaattttgcttatttgggtaaaagaattgcggaaattccccagaatcacatggattttagagattatagccaaacttattcaacacaatacaaccaaatggtagcgcatgaagtaggctatgaagttaatcagccaaatgctattttggggttagcgtattcagtagctaatcataatttaggttcaccattaaatctgcatccggtcaaccgaattggagcaggacatgatgaccttttacaaagagaaaaagttgtccaaagtgctagtgcgattcgaaatttattattgcatggtgaagatacaaaaaatttaaagtattggatgcctaaagcagaagcaatggtgttagctgagcagaaaatttatcctaattggaatttgctatatccatttttgaagtatcgaattgaatcatcttcagttgaagaattgcgtcatatttatcaaatgagcgaagggcttgaatataagatgaaacaagagattcatttagcccgcgattttacagaatttttgcggcatatcaagtccaagcgttatacttattcccgtttgcgccgtttgagcttatatactttgcttaatgtcactcaggatgatatattggctagctttaatcatgagtctttgatgctcttaggctttagtaaggtaggtcgcaaatatttaaagcaacagcgcaaggaatttcagacagaaatcgtctctaaagttgataaaagaagtgctaagaacggctctttagctttacaagttagggtagaccgtttatttgaacaaataatgggcgttgatcaaaactttggtcgacggccaatcgaggtgtaaaaatgttagaacttagtttttctaggattcaaaattccaaggaaccattaactcacattgaacgtgatttggaaatgcgtccagaattttttaagcgtagtaaagatctactaattgatgcgaaaaatgtaaaagtgagcggtgacttgttctatcaagaaccatttgtgactggcagttttcatgtggccgctgatctggttgtgccatcaagcagaagccttaagccggtaaactatcatgaagattttacttttactgaaaactaccttgatcgtaagccaaccaaggaagaattggaagaaaacgatactattgtacaagttgagaatgaccaaattgacttgcaaacagcggtagaagataatattttactccatattccaactactattttgactcctgaagaaaaagaaaagaatattttcccagagggtcaaggttgggaagttgtttctgaaacctcttttgaagaaggcaagaagaaccaagttaacccagcttttgctaaattgaaggtcttgcttgatgggcaagataatgataaggacaataaaaataagtaataaatgtaattgaaaaatatggtggacaatcaaagaaaatttttactttgattgttttttaatcttgtgttagaagcacttttaaagtatcctttaattataaaagcattttttaattaatttattagtattagaaaaccaaattgatctacgaggaaatgaattaacatggcaaaaattctaattattgaagatgaaaagaacttatctcgctttgtcgagcttgaattgcaacatgaaaattacgagactgttgttgagaataatggtcgtaagggattagaagatgcattgagtcaagactttgatgctatcttgcttgacttgatgttacctgatttaaatgggttggaaattgcacgtcgtgttcgtcaagttaagactacgccaattatcatgatgactgcacgtgattcagtgatcgaccgtgtttctggtttggatcatggcgctgacgattatattgttaagccttttgcaattgaagaacttttagctcgtcttcgcgcagtgttacgtcgcgttaaaatcgaaaaggacgcatcaaaggttactgttgctaagcaaaagattgtaaaatttaaagatttgacaattgaaactgctaaccgaattgtgcaccgtggtgatggcaaggcaatcgatttaactaaacgcgaatacaacttattaatgaccttgattgaaaataagaacaacgtagttagtcgtgatcaattattaaacaagatctggggtccagaatctaatatcgaaactaacgtagttgaagtttatgtacgttatttacgtaataagattgacgctccaggtcaaccatcttacattaagacggttcgtggtaccggttatatggtaagagatgaagatgatgatcaagaataaagacgaggaaaaagaggccaagcactcatccctaattgtgcgatgggttagtatcgttgcattaacgattacggtctcttttgtcatattttcagttgttgcctatcaaattgttagtcatcaatcgatggaacagcaacaagagacatctaataatgtagttaccacgatggaccggacattaagttctattcaagatgagctagagatctcaaatgtaattcctgctctgtcaccgtctaccaggcgtattttgaggggcggtcctgctattagcaaaaaagatacagagaataaagcatttagtgatagcctgatttcatcgatttcgaatccagatattaatgtagcagtttacaacaaacatgatgaaattgtttttactaatggtaattctgcacctaagctaaaagaatttgccggcaaccaacttgaagaagtagtaaaccgaaaaaaaggcaaaatgcttttaacctaccagaaaatctattctgaggtaaatggcaaattaactggctatgtagtggtttctaatagtatgacttattacaatagcttgatgagtaatttgcttcattggatggtaattatttcactgattgcaataattatcttcattgcaatttcttatattttggttgttaatgtagttcggccaattaagacgatgtctaaggtggctaaggaagttaatgctgatcctaatagtgaggctagaattaaggaactacatcgagatgatgagttagaagaattagctacttcgattaatcaaatgctagaccggatgcaaggttacattgagcaacaaaagcaatttgttggtgatgtctcacatgaattaaggacaccagtggcagtaattgaagggcatttgaacctgcttgaaagatggggcaaggatgatccgcagattttggatgaatcaattaaggcttcgttgcaagaagctgatcggatgaaacatttaattcaggaaatgcttgatttaactcgagccgagcaaatcgatgttcaatatccgtatgaagtaagtgatgttaatgaaatcatccgcagagtggtcgctgatatggcaatggttcatcctgacttcaagattcagctggatgaggatgatttacctgatgatacagagattcaaatgtatcacggtcatttggaacagttgctagtaattttgatcgataatgggattaaatattcgactgatcgcaagcagattaatgtttcagctggtgtaactaagaagaatgttaatattattgtgcaagactttggtgaggggatttctgaagaagatcaaaagaaaatcttcaatcgcttctatcgtgtggataaggctagaacccgtgaaaaaggtggcaatggtttaggtctatcgattgcacaaaaattagttgctagttataacggaacaattagtgttgaatctgttgagggtcagggcagccagtttaaattgaagttccctcggttgactaagaaaaaagccgctaagttaagaaaattaaatgagaagaaacaaatgcctaagagcaatcttgaggcataaacaaaatcctattaaatcaaggtttgggtaccaagatttaataggactttttttctctagaggcttaggtattagaaaataagaaataaaatgcttcgaaaataattataatttttattaatttaagcgatataattagctaaaaatatttaaagttaagggatgtgacataatgaaagaacgcattttttcaaggaaattttggcagaaagtttttaactatcaattgattatctggtttctcttgatgattagttatactttttctcagcggaacaatcatttttattttataggggatttgttcaatctagcttttagtacggcgatcatgggattgaacttttacgtgcaatttaaaaaggattccagcaagactaatactcaaattgttcgctggctgaccatagtaatttttgctaaatttggcatatcactgggaatttcttgctaaaaaacctgccggctatcgagattctattagtattactgctatgggcggtttatattttcttgctagttccaattgcagttgtacatgttggaccgattaaaaattggtttttacgcttgctaactatttactttcttgatattcagtacggtgatgcacaaaatttagcaataaatccagatttttgctggcttcattcacttacttatcaaggtgtaatcgcagctattgctttattaacgatgacttgtttcttagttaaagcttggggctatcacttcaatccaaacttaaaatttattaaaagttcaagctttcagaagaagatcttgctggctttattgatcatggcaaccattgatttgttttacaatattcctaatttaactgcagccattgagcccggaattttggaagaaaccgaacgctatttattgatcgtaatttttttagctggttttaatagattcccaaagtatcgcatccctgttgcaatctatggttcagcaattttgttcggccttagtcatttaagtaattttggctggcatggagaaagttttactgcaacaattgcacaagttattggcgtaatggggagcgcctttatctgggcagaattgtatctctatacaggaaaactatggttgccgatgatctatcactttttaatggattatatttctgatttgcaatctggttggaattctgctggctggtcttggaatggcgaaatcactgattatatttatactgtattaattgttggcgttccattgctattctcaatttggatgcttttcggtaaaagaaggcaagtaatggaagataatgcagatttgattttggatctaaacggtaggcaaagcatgatttagcagtgacttatattaaagggactataatgtatatgcaagggtaaaataattaagagaggtcataaattatgaaacttaagagaattgtattaagtattgtggctggaactgcgcttttggttcctgcagctttagcgggtcaaaatcaattaacaccggtagttcgggcaagtactctgaagaataagattacaactgttaagagctataccaatccaactttgtataataagaatggtaaagagctaggtagccaagatcggataaattttaagaaaccgatcagtttttatgggcaacctattgttattcagggacccagggtcaatgcttttattaatcttaatgggatgccacaagctattgttaatggtgaaacctatgcagatttaggtgatggtggttatgtcaacatgaaatcggttggtagctataactggaataataatgagatcggaattattaaaaacacctatatttacaatagcaagggtaatcgtttatcaacttatcgcggtggcaaggcttatttaactaaaggtagcaagattaaatatgctggtaaaagttggactacttatcctgattcatattttaatttaggtgatgggacgtatttaaagtctaataacgttaataccatgaatggcaaaggcgttttgaagctgaatgctaacactgctatttataataagaatggcaagcgtattagctttaatggacaacaggtttttcctaaatactcaattataaattatgctggtaagcgtcgcactaagacacaaactgacgattactattacacaaacttaagtggtagtaaatcatatgcaattaagaattataagattaaaggtcaagactattattacattggcagaggtgcttatatcaaggcaatgaatgttggtcgcatcaatggcaatccggtatttcgtgatggcggtgcaactacgattgttccgcagacagatttgtacatctataattctaaattaaagaaaaccaaacaatctgttaagaaaggacaaaagattagagctttagatccagttgttcttggtagtggtgatattgcccaactattttacagaattaagggaacatctaactatgtttcctggggtgattatagtgagtatggttttgaagatgatgagcacgtgggctacttcaactttcgtgttagattaaatcctgttaaaactattgaaaatgccgctacacgggccgctgaagaatcagattaattgggagtgaagacgttatccatttggatagcgtttttattggattatgaaaaagaattaatctgaagtgtctaggaaaactctaaaaattgaaaactcctactaaatcttggcataataagccttgatatagtaggagttttgttttgagttaaagccaaaaatcgattaaaaatagctttttctcagatacaaacttaattttttctatagagatctttcttcaaacaaatgaccataggaacttaaaattctagctaaatccgtccaagtaagactgatagttttggtattatcattgggatggacgccaacataattattttcctccatggccgcttggtctacaatcaagggaatagtgttgctagaatcattgagtaagttaaagggtgaaaccgtaccagatttaaccttgagtttttcctcaagttcatcttctgaagcaaaagttagactaggagaaagtaattcactttgtgcttttttccagtcaacttttttattctcaggcaatatgagtaaataataattttttccgttacgcgatttaataaaaagagtcttacatttagtaaaatcttcatttttcaagtatttatctgcttctttagttgtataaactgctggatgagaaaaaacttggtaactaatatcgtgatcatctaaaagttgtaatatttcttgagtatgcatattttcctcctaataaaaaagtcaggattttactcctgactgataactatttacgcttttgcttacctttattacggttacgtaagtcttggtgtagttctttcttagcttcagttgtagccttgctttgaccgctattggagttaaacaaagcatccactttttctttagtaacaacagtttcaattggcttatcttttaattcatcggcaatatgcttcttaacactaggtgtaaggacaaaggtaacgattacttgttggacaatcattactaagttaccagcagcccagtaaagagctaaggcaccagagaaggataaactgaagaacaaagtcataattgggttaacaatcatcattgattgcatggtcttcttttgttcttctggaataccaattagtgagatataaccttgaataacggtaaagacagtcgcaataatggctaaaacaacagatttggaacttagagaaataccaaagaatttggattgtgccaattgaggtgaatagaataccgcttgataaattccccacataattggtaactgaataattaatggcaagcagcccattccaccagttaatgaaacttggtttttagagtaaagctctctttgccaagttgataaagtcatttgttggtcaggggtgatccccttatgtctcattgcattttgaatcaacttcatttgcggttgcagacgagccattttttcctgttgacgtacactcttgttttgctgtactaacatcaatggcatcaagattacacgtacaactaccgtaataatcacgattccccaaccagcaccattatcgccgccaatcatgtgcgcggtttgaatcatgatattttgtaaaggtcggcctaaccattggtaaacccaaccgtaaataccgctgtgcggtgcaacgtgtggatcagttgttgccccacaggcacttaatacaagagtagctactgctaataaagccagtactccagcgtatcttttaatttttttcatttaaataaatcaccacttaatttctatctaaaaatgtatgtctctaatataatacatgaaaatcatgcattttttctacacctggaaccgattcttgactaatattttgaatttgggcaaatccagatgcagtaggtagtttttcaataaagcggtcgattttatcattgtctgcttgtaaatagattgtaacggtaccatttgcattatttttaacagtgccaggaatacccatcttgttagctaatgccatggttgaccaacgaaagccaacgccttgaactaagcctgaacaaattaattttcttgtttccatttttatctcccttatttaaattaagttcaactttgattttagcatgatcaaaatagattatcagttataatagattttgaatacaaaaaggagaaaaatatgcaacaaattagttcagttaataatgcaacgattaagaaattagcgaagttaaagcaaaagaaataccgcgatgatgaaggcttatatttaattgaaggctttcacttatttgaagaagcacttaaagctggtaaaaaatatcagtatatcttaggtactgaagaagcacttgatcaagcagatagtgaatatgaagttaatttaagtgggaagaatgtcgtattaattaacaaagcgattgctcgccacttaagttcgactaagaattctcaagaaatttttatggtattaaaaattgatcaaccaaaagaatttccgtttaattatggcaagtgggtgctgcttgataacttggctgatcctggtaatgtggggacgattatcagaactgctgatgctgctggttttgatggggtagttctttcaccagagagcgctgacctgtataatcctaaaacgcaacgtgccatgcaaggaagtcaattccatatcgatttgattaagcgtgatctagctgatgtgatcaccgattttcaggatgcagctattccggtttatgcatcgctgcttgatcgttctgctaagcaattgcctgatttcgaaaaagtgccacaacttgccttaattattgggaacgaggcgcatggcataagcaaaacaattgcttctttagctgatgaaaagctttatattccaattaaaggacaagctgaatcgcttaatgccgctgttgcagcagggatcatgatctatcactttgcttagcacttttaattagtaagtagatctactataataattttagtaatactaaaaagtattttatataatagtatttttactggaattatataatacggagggacttacctatgcaagaagttaaagagaaaaaggacgcagctccttgtaaaccagaagattatgaattatgtggtcattttgttagtgcgtttaagattattggcaaaaaatggaatggcttaatcatcagttctttgtgtgatacacaagatatgcgctttaaggacttggcacgaactgtcgaggcttgcagcgaccgtgtcttagttgaacgtttgaaggaacttgaaaaggacgatattgttaaaagaagcgtcgatcaaagtaccggtattatttcatatggtttgactgaaaaaggtgcggaacttaagcctgtttttgatcaagtacataattgggcagataaatgggcttaagctattgacattaagtaagcatagaagtatattacttattgtaagttgcttatttaaaataagattaggtgaaaggagtacgaaaatgaaatctttaagtatgatgaatgttaatactgactgttgttcttgtgtatctaacattatttttaatactcaagaactcagttttcgtatttccgaatagctttaatccagagatcaaaaagatttacgttagctgaaaagacgtagatcttttttatattgtttaaagagacctatgggagtaggtctttttttgtatgattgggggatttttaatgaattggacagttatccagcaagctctaccaatatttgcgcgcggctttgaactgaccttatggctttcattgattggcattgttggctcaattatcgtgggcattattgtcagcttagtacaatattttaaactaccagtactaagtcaaatttcaacggcatatgtcgagctagctagaaatacaccgcttttgattcaacttttctttttgtattatgcttttccagtaattggcttaaaaatgtcggcagaagtctgcggcattatcggtttgattttcttaggcggcgcatatatggctgaaggctttactggtggctttaatggtgtgaatcctagtcaaattagtagcggtaaggccttgggaatgaataattttcaactagctcgttatgtggtttttccacaaggattcagcttaagtatgccagcattaacggctaatattattttcttaattaaggaaacctaaatcttttcagtaattgcaataccagaattgactaacactgctcttgacttaattggaatgtactatcggtcaaatgaatacttactgatgttagtagttgcatatgcaattattttgattccggtgattttattattaacttggcttgaaaagagagtacggtatgcttcattcggggattaatgttttatttgaagggagtaactttgctcgcttgatggcaggactatggacttcaatttggattgcggctttgtcattaattatcggcttagctgtgggtacaatttttggtatcttaagaacgctcaaaaatcgaccgattcgctttgttttgcgcctatacctggaattctttaggatcgtgccaactgtagttttactttacttagtttattacatcttgcctagaagtttgcacgttaactggccagcaacttggatggcagtcttagccttttcaatgtgggtagccgctgaatttagcgatatcgttcgtggagcactagaatcagttcctaagacgcagcgtgaatctggcttagcgttggggctaaatcgcttgcagctatttcgctatgtattattgcctcaagcggtcaaattagaattgccagcaacgatcaatttggctactagagtaattaagaccacttctttgttaatgattatcaacattatggaagtgatcaatgttggtcaacaaattatcgaagctaataaccaacaatatccagcaggcgttttctgggtatatggttttatctttatcttgtactttattttagattatccattatctgcatgggcaaagcgtttaaccgctaaaaattaggtgaatgaaatgacagaagaagttttaagagtagaacatttaaataaattttatggtaaacatcagaccttgtttgatattaattttagtttgaacaaaggcgaagtattgacgttattaggaccatctggttcaggtaagagtaccttgcttagaaccttaaatggcctagaagaatatgaagacggcgcgatttatttccatggcaaaaagattaatcctagtccaaaggaatggcaattattgcggcagaagattggcatggtttttcagagttatgatctgttcccaaatttgaccgtaatggaaaatattttgctggcaccggtgaaagtgcaaaagcgtgatgaagacgaggttaaagaagaagcagtcaaattactaaaacaagttggcttgtcggaatatggggatgcgtatccgcgtgaattatctggtgggcaaaagcaaagagtagctattgtacgagctttagttatgcatcccgaagtaatgctttttgatgaaattaccgcttcacttgaccctgaaatggtgcgcggcgtgttagatattatgcaaagattatctgatgatgagcatataacgatgatcattgtaacgcacgagatgaactttgctgctagaattgcagataaagtattgtttttagaggatggaaaaatcttagaggatacaccaggcaaggaattctttgccaaaccgaaaacgaaacgggcacaagaattcttagaaagtatggatttttaggtgtgaacaatggcaaaaagatttttaactggattatggctatcctattcgtagtagtagtcttggttgcaggctatattggcattagccggccaggcatcaatggcactgcttcaggggatagatggaatagtgaaaataatgtttcttcaattaaaaggcgtggttatctaagaattgccgtttttggtgatttgccgccatatggctgggttaattcacaaggtaagcgtgttggttatgacgtgcgtctagcgcgcagagtagctaaggatttgggtgttaaacccaagtttattcaggtaaatgccaataaccgaattgataccttgaattcaaataaggcggatattgttctagctaacttcaccttaacgcctgaacgtaaaagtgtggctagttggaccaaaccatacatgaaggtatcagtcggggtaatttcaccaaagtcagctcctgtaactaatgctaagcagctaaagggcaagagtgtaattgtgactaaaggtacgacagcggaaaattactttactaagcaaaaaggcgttaacttgctgaagtttgattccaagacccagcagtttaacgcaattaaaaacggccgtggcgcagctttagccgatgataattcttatttgtatgcttgggttaagcgtaatcctaagtttactgttggaattaaaactattggccctaaccaatacatctctggtgcggtgaagaagggcaacaagtcactgcaaaaatggatggatcgtgaaattactaagctgaaccgtgagagcttctttacttatgattataataaagaattgaagccatactttggtaaggaaatcagacctagtgacattgttttgccgcagggaaaataaaaaacttgcaagaaacaagtaaaagaaatatgataatagttaattactaagatcaagactagtaacagattatttttctaaagagagtcttctttcaaaagctgcaagagaagatagaaaaagtctgtgaatttcatcttgggagtaggatctaatcaattccggtatttcaccgttaacgaaaacttaagtgtgggcgttgctacgtccaaactagggtggtaccgcgacgcttcgtccctattggagacggggctttttttgttttgaaaggaaagatttaatggacttatttgataagttaaaagagctccatgaagaagggcttaagcaaatcaacaaggctaaagacgaaaaaactttgaatgatgtcagagttgaacttgttggtcgtaagggcgaattaactaagattttgcactcaatgcgtgaagttgcgccagaaaatagacgtgaagttggtcaaaaggttaacgaattacgtgacttgtttaatgctcaattagatgaagctaaagaaaacattgttcatgcaatgttagttaagaagcttgaagatgaaaagattgatgttactttaccaggtcgtgaagcacatcttggttcaaagcacccaatcaacattattttagatgatcttgaaagctactttattggtatgggctatcaagtagttcaaggtccagaaattgaaactgatcactactgctttgaaatgatgaatatccctaaggatcacccagctcgtgacatgcaagctactttctacattgatgatgaagatttgcttagaagtcagacctcaggtgatcaagctagagtcctagaaaagcacgacttctcaaagggtccacttaagatggtgggaccaggtaaggtataccgccgtgatgacgatgatgcgactcactcacaccaattcatgcaaatggaaggcttggttattgacaagaacgtaactatgagtgatttaaagggtactttggaattaattgccaagcacgtttttggccaagatcgcgaaacccgtcttcgtccaagttacttcccattcactgaaccatcagttgaaatggatgtatcttgctttaactgtaatggtaaaggctgccctatttgtaaatacactggctggattgaagtattaggtgctggtatggttcaccctaatgttttggaaaatgcaggtgttgactcaagcgtttacggcggttttgccttcggtgttggtcttgatcgtttcgctattttgaaatacggtatcgatgatattcgtgacttctacaccaatgacgtacgtttcttagaacaattccgtaaggaggaaagataattaatgttagtttcatacaattggctaaaagattttcttgatttagatggtcaagatccatacgaattagcagaagaaattactcgtagcggggttgaaattccagaccgtgttcatccaatggatggcttgaagaagttagttgtcggccgtgtccttgattgtgaaggcgttgaaggtactcacttgcacttaactcacgttgatgttggtgaagacgaacctttgcaaattgtctgtggtgcacctaatgtagctgcaggtgaagatgtgattgttgctcttcatggcgctcgtattgctggcaatgaaaagatcaagaagggtaaaatccgtggcatggaaagttacggcatgatctgtggtttacaagaaatcggctttagcgatagcgtggtaccacaagaatttgtcgatggtatttacgtattcccagcagatgccgaagttaaacctggtcaagatgtatatgaagcacttggcatggatgattacattttgaacttcgacattactcctaaccgtgctgatactttaggcatggaaggtgccgcttatgaagtcggtgctattatcaaccaaaagccaaaggttgaagaaaaggttgtcttaaaagaagatggtccagcctggacagattcactcgatgttaaagttgatgaaaagcttgcacctaagttttacttacgtaagctcgagaatgttaagattcaagactcaccactttggttgcaacgtcgtctttggaatgcaggcattcgtccaattaacaatgtagttgacgttactaactatatcatgctgttaactggtcaaccaatgcatgcttatgacgctaagacttttgctaacggaaagtttgaagtaagacttgctaataagggtgagaagcttactttgcttaatgaaaaagaagttgaccttgaccctaaagatatcatcattaccgatggtaaaaagccagtaatgatggctggcgtcatgggtggacttgattcagaaatcacttcagaaactaccgatgtcattcttgaatcagccatctttgatccaactttagtcagaaaggcagcacttcgtcacgctaaccggaccgaagcttcaagtcgctatgaaaaaggcgttaactgggatgccactgaaaaggcaattaacatggctgcgcttttacttagaaatgacgctgacgctactgttgatgaaggtattcttaaggcaactgaccaaaagcgtgaaccagttgtggttaaaactactgcttcatacctcaataaagtattgggcactaagttatcagttgatgaaattgtaaagatttttgaccgtctttgctttaaggtagatgttgatggtgataatttagctgtccatgtaccaaatagaagatgggatatttcaatcccagccgacttagttgaagaagtaggccggctttatggctatgacaaccttgaatctactcaacctgttttgccagaaactcatggtggctactcagaaaaagaagaaatgatgcgccgcatgaaggcaattgttgaaggacaaggcttgatggaagctatttcttactcattgacttcacctgaaaaggccgttcgttacactaaggatccaaaagaattagttgaagttaaatcaccacttaactcaagccgttctgcaatgcgtgagaatttgatgactggattggtagatgctgctagttacaactttgctagaaagcaaacacaattagctttatttgaacaaggcagaacttatgaccatgatggtggtaaattcaacgagcatgaacatttagcagctatttactctggcaatacttttgcggaaaattggcaacatttaacccaaaaggtagacttctactttgttaagggacagttaaccaatttgttcaatgcaattggtattggtcctgaaaaagtggtttatgaggctaaaggcatcaaggggatgcacccaactagaactgcaggaatctacattgataagcaatatgttgggatgatcggaatgattgctcacgctgtaacgattgctgataaggcacttcgtggtagcgagctttatggctacgaaattgatctcgatacaattattccaatgttaactaagggcgtaactgcagtgcctgcacctaagttcccagcaattcaacgtgacctttcacttttagttgataagccagttactaaccaagaaattgaaaacgtcattaaatctaatgctggtaagtacttaactgaacttaaggtaatcgatgtttatgctggtgctcacattgatgttggtaagaagagtattgcttacaacttaaccttcttgaacagaaaagatactttaaccgacgatgttgtcaataacgcgatggataagattgttgctgctcttgaaaatgatcttgcgattaaagttcgttaaaggttgacattattgacgtaaattaatattattgatcagtgcaagataaagaaaattaatttctgaggagttaaaaatatgcctgaaaaatcttatccaatgactgctgaaggtaaagaaaaacttcaagcagaattaaagaacttaaaattagttaagcgtccagaagttattgaacgtatcaaggttgcacgttctttcggtgacttgtcagaaaactccgaatacgatgcagctaaggatgaacaaagtcaccttgaggatagaattgctcaagttgaagaaatgcttaagtatgcacaagttgttgatgcagaaagcgttgatcctaacgaagtttcagttggtaaaacaattacctatactgaagttggtactgatgatccagaaacttacactattgtaggtagtgatgaatcagatccattgaatggcaagatttctaacgattcaccaattgctcaagctttattgggcaaaaagaagggtgaaaccgtatcaattaccactcctggtggcaagtttgacgttgtaattaacgaagttaaagcctaataataaaaagggagggtagctatgactatcttcctttttgtttttttgaaaggattttaaaatgagaacagttggtattattggcatgggccatgttggtgcaaccgttgcctatactttatttacgcacagtatggttgacgaactgattttaattgataaaaatgaagctaaagtaaatgctgaatacaatgacttgcatgatactttggctagaaatgatagctatgttaatgtgcgaaagcaagattgggacggcttagaagatgctgacattattattaccgcttttggtgatattgcggcttcagttaagacaggcgaccgctttggtgagtttgaattaaatgcaagaaatgccaaagaagttggtgcagatattaaagaatcaggctttcacggcgttttgatcaatatttctaatccatgtgatgcaattacccaaattttgcaagaaacttctggtttaacgaagaatcgcgtctttggtactggtactttccttgatactgcaagagttcaaagaataattggtgaaaaacttggtcaagatccacgtaacgtagaaggtttcgttttaggtgaacatggttcttcacaatttacagcctggtcaacggtaagagttaataacaagattgctttccaattgtttggtgatgaagaacaagaaaagattagtgaacaatcaaataagaattcctttattgtggctaagggaaagggctatactagctatgctattgccacttgtgctactcgtttagttcaagcagtctttagcgatgctcatctatattgtcctgtttcagtttataatcctgaatacaagacttatattggttatccagctattattggtcgcgacggcattgaggaagaaattgaattaaagcttacttctgaagaaaaagaaaagttgcaagctgctgcagataagatcaaagaacacttgaagcaattgaagaaataagtaatattcattataaaaaataagacaggaattacatctgctgcaattcttgtcttatttttgtctactttagctttacgtcccaagctgcaatttgcttattgccatagtagcgtttataaatttttttagtcttcttagtttgatacgccttaacaacttcttgataaattttcttatttttgtcttttgtccgggcacaaatgatattgatccattgttcagaatccttatttaaaggttctacaaaaatagtctgcttatcacctaaatgagcgggaccagcaaagtcattgttaacaaccgctgcatcaacgtcatcaatgacacggctagtttgttctgatgcaacttctttaatcttgaaatggtcaggattagaggtaatatctgctactgatacaagtactttgcctttcttcaatttgattaaacctgcattttttaaaacaaacagagctcttgattcattagtaggatcgctaggaactacgatagttgctccatcgggtaatgcattaaggctatgatatttcttagaatataggcgaataggagcaatgtaggtcttaccaattgcagtgattccaccatgatttgctttattccaagcattaagaaaagcatagtgttgaaaggcattcagatcaacatcaccagatttgagggctttatcaggttgatcataaccgtcaaaacttttagtggttaaaataatgccatatttttctttaacggttttggcaacgctcttccagatagcaatatcgcctttgctggcaccaacaattccgacactaactttagtttgactactgcttttgggtgtccaaaagaaactaaaatagccagctacaataattaataagccaatgacggtgctaataataatgtgacgtcttcttctttttctcatttttatccctgccttttgaaaaaataaaaaacacccatcctgaaaaggacgagtgcttcgtgttaccacctttaattcgccaattatttgcataaccagccttcacaactatctaacaatagcttgcattgctaacgagtgcaaccccgatgctagctaaatgttactagcataatcattctgaatccatcttcattgaatcattctttttgcttttcaccaaccagcaattctctgttaaagatttggttcaattactctattcatcaagatttttaattattgttaataatttatcatttaattttaattgtgttaaataaatttttttacttagttaaaaagttagtaacggaagaaatagtgagaaaaagtttatttttgtcgattaacaaagtagtaaatgagtgagacaaccgattcagccaacatcccaccggccatccagtacattgccatcatcattttgccggtaaaagtaaagtaggcagtaatggcgtaaacaattacccaaataattttccaaaataagttattcattcctgagcacattttgaagctcctttatttttgactagcaccagaactgctgtcaacttccatgccgcaaccttcggtatccattcctggcatccacacatcttcaggtttaatgcctctttctttagcaaaggcgtcggttaatgtcttcatatccattaacttgtatgtctttgggtgtttagggtcgaatacttcgatttgagccatcattccggcatcttcgtgttcaataatgtggcagtggtacatgaagactccagtttgtgggaattctacacgcaagcggacggtttcacctggtctgacaggaatggtgtctttgtaaccatattcatttggaaatggcttttcgccatcacgtgaaacgactgtaaagtgtgtgccgtgaatatggaatgggtgcaacataccgtgttccttagagttggtattagttacgtcccagtattcagcatgactaacttgttgcttcatatcgatccgctgcattgcgaattgcttgccgtttatcttgttgtgatcatccatagttactttacgaactggcaaatcttcagcgatttcaggaatttctggtttgaataatgtatcaggaataacactgttgtcaggtgcaaacttgtgaattctaaattcaattagtttgaaatcatcagtataaaggttaacgacatcgccatcatggtaatccttgaagtcaactacaacttgaagccgttcaccaggtgttaccaagatcttagtcattttgattggatgaggcaaaaatgaatcgtcacctgcaatttgagtcataactaggtcatcatcaaagtgcaagcgccattcacgacggttagacccacctaagaatagtaaacgaatcttttgtgttgttacatcaacataagggcgaaccgtgccgttgattaatggtgtttcaccgaagacgcccattgcatcataatcagcgcgatagtcaagttgattatctttgtggaaagtacggtcttgcaaaataactggaaactcgtcaacgccatagtttttaggaattgggagtttagcttcgttttcatctgttactactacgcccatagctaatcccatccaaacttgggcagcggtggatggacatgggtgagcatgaagccatgttaaggcagctggttgattaacagtgaattcgatttgcttttcttcacctggataaacaggggcatgacagccaccatcagtaataggaccaggaacttccatgccatgccagtgataagttgttagttctggtaaactgttttttaaggtaacgtgaactcgctggccacgttttaagaccatggttttacctaacaaaggagcgttataaccccaagtcttggtcttagctccaggcaatatttggcttttgctttcaattgattcaagagtgaaccagacatcagtatcagtttccttatccggtgcaaggactggagggacagctaatggctgagcttctacaccttgagggatgcttaatttcttgtagtggaagtggtttttgtcaaaatcttcatcttcgataaagtaattagtgtatatcttatctgtcatcttattaacaccatccttttgacactaacttagcatgattttttaccgttttcaaggcgcaagaacgctgttatttaaaggcttgcatgtctattataactatgtaatgaaaaatatttttactattttgtaatcgcttacacttaggtgaattatgttattttacaagatttgttgccttgctaggcttgcgtgtctccggtaaactaagcatgaagaggtgactagatgtataaaattattgcgtgtgacttagatgaaacgttgttgagcgcagatacgcatgtctcagtagaaaatagagaagcgattcaaaaagcagttgctcacggtgtaaaatttgttcctgcaactggacgaggctacgtttctgtccaaaatactttaaaggaaataggattagagcaggcagctaatgaatatgtgatttcattcaatggtgccagcattacagaaaataagaataatcgcgtgctgtattttgacggcttgcctaatgaaattgcggatcggttatatcggcatggggttgaactagatattgccatgcatgtttacactcaagatatggtatatacgtatcatatcgatgatgatgaacgtgcctatatgacgggacgacaccagtttaaagagattgaagataaagacttgtcatttttggaggggcagaaaattgccaaggtgctctatgagagtcttgataataattatttgcaccggatcgccgctgaattaggaccaattacgcaagaattggatatttcatattcatctaatcgttatttagaatttaaccgtaaaggtgtcaataaaggcgcgggactgatgaagctggctgagcagcttagggtgccgattgaagaaacaattgccattggtgataattttaatgacttgtcaatgattcaggctgctggtgtgggtgttggtgtggctaatgtcaatcctgctatgaaagagcaatgcgattacattactcaggctgataataatcatggtgcagttgccgaggcaattgatcattttatttttaacaattgaaaaaaataaaaaaataattgacagattaaaaatacatgatattattgtttacaacaaataaaaaaatgagctttgataaggaaagtaacttaagaaatgatttgcagagagtcttcggttggtggaagaagataatgatgaattaagtgaaaatcacctttgagctgaaagtgcgatattagcattttcagggtccgccctctatagcggcgacgtatcgctgattttgatagaatcagccgcacgtgcatgaggtagaatttttgtgagtattattctacgaataaataggtggtaccgcgttgaagacgccctattagataaattgatctagtagggcgtttttttattatcataagcttgttgttaattttttgacttatgggagagataaaaatgagaaaaacattgaagcacttatttggcacgactgtagtagcacttttaggcgtaagtactttatctgcatgttcatcaagccaatctggtgctaaagcacctaaacaagaattgacctggatgactacctcagaaatccaaactatggatccttcaaagatggtagatacaactggtagtgaacaggcatctaatgtttttgaagggctcaatagactgaataaagcgggtaaagttgtatctggtgtggctactaaaactaatcagagtaaagatggtttgacctggacttttactttaagaaagaatgctaagtggtctaatggtgatccagtgaccgctgaagattttgtttattctttaagacggacacttgatcctaagacacaatcacaacagcaaaatgagtggtcaaatgtagttaatgcagatgatgttttagctgggaaaaaagctccgtcgactttaggtgttgaagctaagggtaaatatgaattggtagttcacttgaaacatcccgtaccgtattttaaagccttgtcagttggttggaatccgcaaaataaacacgtagtcgaaaagtttggcaaaaaatatgggactgcatctaagtatatggtttacaatggtccgtttgttcaaaaaggctggactggttcaagtcttaactggaagttagaaaagaatgatcaatattgggacaaagataaagttaaattgcagacggttaattatagtgtacaaaagacgccttcaactgattacaatctgtatcaggctaacaaattagatggtgcctatcttgatgttcaggcttcaaagagactgaagggtcaatctggttatacagtctataaactagatagaactgaatacttgactttcaatgtatccaagcatccagaactagctaatgtcgattttagaagagcagtttcaatggcacttaaccgaactcaattggctaaaacagttggtggtgctaataccgtagctcgaacttttgctggaccaaatgaatatgttgatggtaagaattttgaccagtatgttgaaagcaaaaatccagctaataagtatatgaattataaccctgcaggcgctaagaaactttatgatagagcattaaaagaattgggtaagaataagttgacctttaccttaatgggtgacgatgatgacgtttctaaaaaggttttagagtttgtgcaaagccagttagaagatacctttggcaaaaaagttgatgtaactgttagaagtatgccgaagactactagagttaagaaaatgctcaatggtgatttcgaggcagtctttactggattgacttcgggctatttagatcctaattcacaattgcacacaatgatgacaggacaaagttataacttcggtaaatggcctaacaaagattttgacaagtatatgaataattcagataaggaattaaatcctactaagcgattagaagatttgtataatgcagaacgtgttttaactgatcaacaaggattgacgccattattccatgatggtcaagcttggatggttcgaccaagtgttaaaaatgtagaattcttgggtggtaatttcagctttaaggatgcatctgtaagtaataattaggagaaaaataatgactaaaacagcttttgtaaattgtaatttattcgttggtaatgaagataatctagtagataatgcttggtttgtcgttgatgatgaaacaggtaaattgaccgatcaaggtaagggaaaatgcacagcagattttgacaaacaagttgaccttaaagggaaatatgtgatgagcggtttgcttaattcacatactcacatggggcttgattctgacttgaagaaaaaatttccgactactgaagcttcgactacttatgcagcactgcgggatctgcgtgaagctttacaaactggtgtgacttatgttcgtagttgtggcacatcctttgatgttgactgtaaattagtgcagatgcgcaagcagtatccttttgaaggtcctcaagtgatgccaactggaatggcaatgtcaattgtcggcggacatggtgatttcaaggtggggttaaatggagagcaaaatgctagtcatttggttaacggtccagaggacatgcgtcgggcagtgcgtgaacagtttgccaagggtgctaaaaatgttaagctgatggcaactggtggaattatgtcattaggtgatgaagttgatgatactgaactttctcttgaagaaatgaagatggcagtagaagaagctcattctaagcatatgacggtttgtgcccatgctgaggggagacgcggtattcattatgcggttgttgcaggagttgattcggtagaacatggtttttatttagatgataatgacttggctttgattaaaaaacaaggtacatttttgtcaccaacattgactgcaggtcggacaatcgtcgttcatggaaaagatgttgtacctgagttctcataccgcaagatgtgtgcagtagttgatgacttttataatcatgtcggccatgcgatcaaggagggggtgagactggcaatggggacagacgcaggaacatatttcaatcgcttctctgatacacctaatgaattagtggaattggttagagcaggagccacaaattatcaagctttaagagcaggcggtttgggtagtgccgaattgcttaaggttgatcaagaatatggttcgcttgaagttggcaaatatgcggatttcctagttttgcgggataatccactagaagatgttgctgcagtcggccaaaaagacaagcaagtttaccaacatggtttacgtaaattctaaatattttttaccacaaataaggcatcctcgtgagatttttcttgcggggatgcttgtttgtgtagttcaaattaaagtaaacattttactaaattttccagtaaaagcgaataaatataacccgaaatataaaaatagttcttgatttagtatgaattacgatgtagtatttaaaccatcaaacgtattactgatgatttgaataagtggagattgaaatgtcaagttttcaagaatactactcagaattacaggaactagcagggtatttactacacaatccagaattaggctataaggagtataaaacttctaaggcagtggaagcagaaattgctaagatttctactaatataaaaatcgaacattattgtaaaacaggacttaaggtaatgtttgataatcattgcccaaaaactattgggattattgcagaattggattcactttatcagccaggtcataaggatgctgaccctgaaacaggagcggcgcaagcttgtggtcactatactcaggtgacaacagccttggctttgataaatgaactgatgaaaaatgatcgtctcaacgagtttggcactaatttggcttttatttttactccagccgaagaatttgtagatcttaattggcgcaaaaagcataagttagctggtgattttacttactttggaggtaagcaggaagctatcaaacttggcgtatttgacgatattgattattgtgtatcagttcatgctataggtgaaggttttgagcgtaggactattgaaattaattgtgatttagctggatttaattttcaatactttgacttctttggtaaggcgagtcatgcagcatttgctcctgaagagggggtaaatgcacagagtatagctaccctatttaccactgctttggccttcaaacgtcaacaattaaaaaatccaaatcaaattaggtttaatccagttatgataggtgataatacagaatcgattaatgtaattcccgatcatgttagcatggggacagatatacgatactttgatgtcgaatatgcacagcaactaatgaagcaattcaatcaagcagcagaaggatgctccctagctttaggcggtaattttaagtcagaaacacaggttggctatttgcctttaaggtcgaatagagacatgaatgctttagtaaaaaatgtatttttaaggaatgacaagatttcagaattgattgaaaaccgaggctataccatggcagctggtgatattggtgatgtaagttatctaatgccaactattcagattggatatggtggttggaatggaaccattcatggctctgattttaaattagttgatccagtttttgtactggacatattcccggaatttatctttaacagtgttttagaaatatcaaataatcttaataaaatcaggacttatcgtagaacaaatcaggaatatcttgaacaattaaataaaatgggagcagaaaaatgaaatctttaaaaaattatggtccattaattattttagtgctattgattgacactattgcggaatttatagggatgcaggttttcaaaattggtaaaattgaagtttcaattctaccattagtattcgcagttattttagcgattattatttatttacttccattaaagccgattaagcaactctacaatgataaaagagtaaagtttgctggaaaatatatgattttaataatgttgccactaatggcacgttatggagcaaatgttgcacctaagattaatgaaattttatcagtaggttgggtatttctcattcatgagttaggtaatttaggtacaattttatttggactaccagtagctttattactaggattaagacaagaggccattggctcaacattgggattaggcagagaaggagaactagcctatattagtgaaaaatatacacttgattcaccgaaaggtcgaggagtcctaggtatttacttaattggaacaatttttggttcgattgtcttctcaattttagcaccagttcttttggggatgggctttagttatcaagctgttgcgatgagttctggagtaggatcaagttctatgatgactgcagcttcttcagctttagcagctctggttcctaaacatagtgagacgattctatcatttgcggcagcaagtcagttgttaactagttttattggaacttatattatgtatttcctcgcagttcctttgcaaagattcatgtatgttcacttgactagtttgcttgataaaaagaaagaagtatacccagaacatgattagagaaaataatttttataaattaggtagagatgcattaattttattgcttagtgttagtttagttttatttgttcagtagattaagttagtaaaaaatcctaagagcaccccaattacacctgatacttttgccggcctaggtctattatggctgttttctctgattggcattattatcagtatgttaatgaaacgagttccgtggaagattgttagaggatttcccattctaggctgggtgtctatcgtttcattagttttctgtttgcttagtccatattgtgttcgtgtaattaatgcagtagattttttatcattaactacatcggtattagcctttgccggaatttcagtaactcatagattgaaggatttatcaaagatttcatggaagatcttaattgtggcattatttgtctttttcggtatgtatttcatggatactttgatttctcaaatagctcttaatttgagtggaaaatagaaaaaatatataaagccacgctcaacagcgtggctttttgaagtgtgtcgggcatgacattcatctagtccaatgaaagcttggcgtaccgcaaggtggaccgctctcgccaatcctatccaatatctatttagataaaatggacaaggaattggaacaaagaggcttgcgctttgttcgctatgtcgatgactgcaatatcttcgtcaagagtggtaagtcggctaagcgcgtgatgaagtcaattacatcatggctagaaagaaaactgttcttaaaagttaacactactaaaactaaagtagttagaccaacgaagagcaatttcctaggctttaccttctggaaaacgggcgaaaactggcaagcaaagccgggagacgaccgtaaagccaagctttatgacaagattagagaattgttgagtcgccataaagcagttgctcaacctctatcattagtctttactaagataaatcaagtggtcaaaggctggggtgcaggcgtttttggctttaacgcaaaagaagtcgcaaaaatgtggcaggaggcctttgatactccgacaagcatctccactgtgatttacgctgttattcctggcagaaagaataaagacgtggtagctgattttaaggatatttttgcttaaatagaaattttctctcaaataacaatccaaacaaaaaagacgagccaatgcccgtctttttattttcttgaaataaatttttagttaaaagttagcttttttaacgtaagtgttcttagaaatacgatagaaagtcttgccgtataatttaattgcgcgaccataagtgttaacgcggtgacctttcttcaaaactttcttattagcacgcttgccgttcttcttgtagacataagcattgtgcttcagagtccgcttaacggccttagctttcttggcagctgtctttttagcagcagcggcatcagtttgagtcttgtcagatgtagtattggcatctttattagcagtgtcttcagcgaccttacctaaagtaatatcagccttttcgttcatggtcttgcccataacgttaagaccgaattctaagctgccagcgccttctttataagcatctgctgagaaaacatagtcaagggatgagccgtctttagcaacattttcttgcttgccggctacaccattcaatgttaggctagcaaccatcttagacatgtcttgacctttggtcattggtgctttagagccatcaacgtgaataattacttcggtaactttaccgtctttaacattaacttgagcagagttgcccaagaacatagcagcttctgatggggtagtgctgccagttttggtaatagtcatagtgatagtttgcaagtcgctgttttgactagtagcagtagttgcagcaacattagtagcaggttgatcagctgcagacactacagctgatggtgccaaaacactagcgcttgcgagtaaagcaagtgatgttaaaatgattttagtattttttctcataaaagtttcctcccacgaattttagatatcgcttacattataatcaaataaatgttataaatcaatatattttttgttattttatttttttatgagcataataaactgaataaaatatgaaactgtcaaatcttttgtgtaaatagatctttctcgtaaattgattttttaattatttatttaatcaaagtaggattctaaggtgtactgaacctgaccaaagcctttgtggattcgattgaaatagcgttcgttgtagctcattgcctgaatgccaataaaagcatcaagcgactgttcagttggaaactctgccttaggcttagctttgcgcttgatcacattgttaaatgattcaatcatgttagtcgaataaattgaagctctgatctgcttgggatagttataaaagaccagcagatctggttctatgtctttcaagcttctgataacatggctgtaaaccttgccccatttggtatagaagtcatgcaggacagctgtggcttcttctttgtttgtctgttgatgcacctgtttgaattcgttcatgatcttttcacgatcgtcgacgcgtactttagcgcagatattgcgcatgacatgaaccaaacagcgttgaaaatgagctttaggataagtcctggccaaggctgttttcatgccaacaacaccatcagaaagaaaaagctcaacttgctttaagcctcgggatttcatgttttgaagcatatctgtccagacttcaatgttctcgctaggtgcaatgcagtagtcaatgacctccttgtgcccattaggcttgatgccaatggcaatatagactgcttcacgctcaaatgtttctcggcgcaaaggaaggtatgtcgcatccaaatagacgcagaaaaacttgtcgcttagcttgcgtttgtggtaagcctcaacctttggaatcatctgcttggaaatatttgatacctgagctggactgtaatggctgccatacatcttttcaattagatcggctatttccctggtggtcacgcccttggagtaaagcttgataatcatgctttccaagatatccgagtgctgcttgtagccaggcagcgtgtgctgatgaaattgaccgttgcgatcccgaggcacttgcacttcaattgggccaaattgcgtatcaactttgcggaaataagcaccatttctagagttgccagtattccagccatttctggcatagggatcatagcccagaaaggcagtcaattcagcttctaacaagttattaacagcctgttgtagctctttgcgcaataaatcatttattttgtctggattgaatagagcttgagcaaaatctttggtaaaatcattcatgaaggagttcttctttctgtatgtgtttttttgttcaaaccaatcatacgagaaaggaactcctttttctaatgtttaaagaaataaatttaaggaatcattcatccttacacaaactattttacagtctctaaaatatcatcttgaaaccgattgcatagttattttaagaactttataatagaaaagactaatagtattaatagtaaaaagaaggatattagaatgaataaaaagttacttaagttaatcgcaagtagttcggtcgcaatgactttaatggcacctggagtggcatttatgcaaactaatccggttgtaatggccgctgaacaaagtcaaaagacagtgggaatgacggtttacaaatacagtaaaaatcaccgcagccatgctaagtcaatggctcaaggttttgtgggagataaggtgcaattaacagttagtcaaaagcatgtgactaagatgacaatccatgtcgatggtaaaaatagtccaatgggcaaggggcaaaacgtaaataagattgtaaaatccctcaagattaatggcgttagcggtaaaaaggaaaatgtttccgccgacaaatctagttttgactttgtttttgcaggaaaagctttcaaaaataatggttgggtcaagatgcaagtcactattgactttggtggtaagatgaccgaacaagcttgggtgaagtatgacaaggttagcggtttaactactagcaagaaaaagaccgacaagaagcaaaagaaggctagtaaaaagagcgtcaaaaaagttagtaagaaaagtacacacggtcagcgcagataaaaaggttcaaaatatcaattatgcggtctataaggcggatcgcagtggcgtttctgcagcaaataatttttacacgcatcatgccaggattgaaaaagtaaagcagggctatgttatgaccttaaaagttgaggtaaagcatgggatggtgaccaaatttcagccggtttcactgggaattggttcaatttcaaacctgcgttttaccaaacaagctggcaaggatatctggacttatcaggtccacttcaagtcgctaaatcagttaaagaagcaggctcaggggagtctgcgcttgagcgtaccaattgccaatattcatgatcgtttgtttaaggtctggtttgcttttggtgtaaaaaatgtggcgcacagttcgactgtaagcaaggcattaaccgaagcaaatagtagcactgattcaagtagtactagtgatgctattactgcagctaatgacgacagtagtaaagatgcaaaaaatgctacaagtagcgctcaaccgcagtcaaagccagttaaaaagcagcagtcttcttcaaactctagtgtaaaacctggggcaaagatgacacccaagaagaaaaagatggcgacgattgcagcggtggaatatccatttttgcctgtgatcgcaggctttttagcatttgatgctgcaattattggtttggccttttacttaagaaataaaattttgaagagaaagaaataatgaaaaatatagctaaaattatctcttttcctttcttgttgctaacttgtttgtttatttttggtgtgactgttagtgcacaaagcgtgagttatcgcacttacaagtatggcacgcatcagacctcgatggctgatggctactatgcgcgtcctgctcaggttgtggtagacgacaatcagtacctggtaacgatgacgattcgcactaagaaagatctaagtccctatccggttcaggtgttaacgattgatggacaagcaccgctaaacgtagtaaaaacgcggcatggcagtgactatgattatcgctatagttttcgcactaataatttaaaacgtgatatttctagtcaaattaaaatagatgtgccacatgtttaccaagcaacacacaatattacttttgcttttgacactacacagttgcctaagttaacaaataaaaaagagcgagcaagtcatgcggaaagtgcgataaaacgcagcgcgccacaggtgaaaaacaagagtgttaagcctaaggagcaattggcacaaaagaagcaagcggcaatagctaacaggcaaatagcgcagaatgcacgcaatcaacgtgctaatcaacaaaggcagcgaaatttttattatgttattttggctggagtgcttagttcgttaattttaattggcgttgctgttttgattgtcgtaaatgccaaggaaagaaaaagtaaatgaaaaaacgtaaaggattaattattggtttaattatatttttagtagcaatcgtcggagtggcaattggtgctaaacgattgattgatcaaaaagttgccaataatgaaaagattgttgccacaagtgcagcgattactgaaatttttgataaattgaacgttaatttagcaggggttccaaagacgcaggctaagttaccagcacgctatcaaaaggtgcccaagattgggagtccaatgaagccaagtgttgaaaagattgcttctttgaatcccactcgtgtctatgcagtctcaactttaaaagatcagtatgatcaatcatttaaagaacaaggcgttaaagttacatatttgaagctggattcagtagctgaccttgaagctacactgagttcattaggcaagcagtattaccggcagagacaggctgattatcagattggcttaatcaaaaaagccgttaaaaaggctaaagcacgtgttcacggtcgtaagcctagagtattgatcttgatgggcttgcctggcgctaattacatgattctaactaatcgatcatatttaggtgatttggtcagaatagctggtggggaaaatatctatcactctgatagtcagatttatttgtcaccaagtaatgactcgctagctactaaaaatccagatgtcattttgcgattagaacatgctttaccaaatgtaactttgccacaatttaagcaagagtttaagaaaaattctgtttggaagacgatgaaagccgtaaagacaggcagagtttatgacctacagcaaccagactttaatgcttcagctaacatgaatgtttctcaagcattgaataaattaagcaactggttgtaccctggaaagtgatcaaaatgaagaaaaaggtaatttggataaacttgattttagcagttttgttaatcagtacgattttctttgcattaactcacggagcaagcaatttttcaatgcaaaagatgactaacagccaattgaatattttgtttaatatccgtgtcccgcggattatttcggcactagtagcaggagctagcctctctgttagtggtgccttttttcaggcaactttgcgcaatccgattgcagaacctggaattatggggatctctagtgcagccagtttatgtcaattgctagcggttattattttgccagaaattttctttggtaaaattattttcgcgattattggcggactgctagcgtttgggcttcttttattattccaaaaaaagatgacgccttatcagttaattatcatcggagtggcattgaatgcagtgttcacggggatgcaggaagttttcactaatagtcaaaatagtggcagcagcctggccacaagtagttggggatcgacgatgtatttattgattattggcgtagtagggctgattttcgcgatttgttttatgaattgggctaattacttgaaggtcaatgatgaagagctgacgtctttaggtgtttctgctaaaaccctgcgtttagtcttgatgctaattgcagtggttttggccgcaacaacaacggcttgcattggtgttttagcttttatcggaattattgtgccacaggttgctcgtttgcttttgggatatgattatcaaaaaatcattccattttcgatttttgctggagcttggtttttattgttcgttgacaccatcggccgggtgattacagcaccgaatgagattgcggctaatattattttggctattgttggtggtccagttatgattttaattttatggaagaggcagaaaaatgcttaaagcgtcgcagattgatttttcatatgggtcaaaacaattatttaatcaattctctctgagcctgcaggagcaccagattacgactttaattggtcctaatggatctggcaagtcaaccttgtttcgcttgcttacacggacaataaggccgtctgcggggacaattacgctagatgggcaagatatctggcagctagctgcgaaggattttgccaaaaaggtagcaattgtccaccagcagaatcaattgtatgatcagataactgtcaaggaactggttaaaatggggcgtctgccgtatcattccttgatgggggatgaagaaaatggatctgctcgccttcaacagattatgcaggagctagagattgctgatttggcagataagtttatagcgcaattatctggcggtcagcagcagcgtgtgtggcttgctacagcactggcgcaagagccggaatatctttttctagatgaaccaacaacatacttggatttgcattttcagtatcgctttttggatttagtgaaaaaattgaatcgaaagcagaatttgacgatttgcatgattttgcacgatttgaatcaggctttgcaatatagtaatcaggtaattttgctcaaccaaggcaggattcaaaagcagggcaggccagaagaggtaattacggcgcagacgattaggcaaaactttggcatagattgcgagatgatcgaaactgagcagggaaaagtcttgttaatggcaggttctgaggcaaaataaaagaccacgagaaaactcgcggtcttttttgtaataataaattattacttgttaacttcatccttgaagctcttacctggcttgaatgctggaacgtttgatgcagcaatttcaatttccttaccagtttgtgggttacgacccttacgagcagcacggtgacgaagttcgaaggcaccgaagccaactaattgtaccttgttgccttcagcaacattgctcttaacaacgtcgatgtaagcgtccaaaatagtgttaatgtctgtcttagtagcatcagtctttgcagcgatttgatctactaattgtttcttagaaatagtttccatgaaaaatacctcttttaatataaactacgattacttattttaacagtaatccgcgtatttacaaggggaaacagcctctttaaagaatttttttaaaaaggaaagaaattctatgtatttgaagcgaaaaatattgtattcgctatcaaaaatgtagttcatgtaatgattcttttgttttgatttgaaaaattaacttttttcaaaaaatttagacattttttgcgtaataaatgatgggagacaagcctaaattttgaattccaaattttgtacagtgatggaatatataagagaggtgaataatctttaattacacaaaccacatcctcgaaatatgcttaaacaatatcaattaagaacgttgaagaatggattaagaatggcaggtataagactatgagcctactaacttataaaggttaccaaggtacttatcgaagttgaaaatgatactttatttggcgaagtcttaggtctagaaaatacttttatttcttatgaaggaaattctctggcagagttgaagaaagatttcaaagcgggtattgatgattatcttgagaattgtcaatttaatcatgagcaaccagaacaggctaaccaagatgcagctaagttacagttgcaaaaattattattaacatcattagcgtgattggaacaaaataaagctcgaaacttctacaaattgtagtaacttcgagctctgcattaatctgtttttgttcaatacaacgcatgctattacatattggcaaatcgatctagttcatcatgtgttcctaatgcaaccaaaactaggattagttcatgtgtttctttatcaatccggtagtacaatagccaatcgtcattatattgacgattaacgtgcattttgcgattttttcctacagggtgatctttatgtttggctagaaattctttgtcattggttaatattgcttcaacacaatcatcaacataatccattggataatgttttctttcatatctcttgtaagcgcggtagtagcgcttggtaggattaacttgcatgattatttccgcatggcctttttgtattcttcaaaagagctataacttccatgataaatgtgattatcagcttcatagttcgcttcatctagttctgtcatgggtcttagttctaaaggaatgccattacttctaacaatagctttgaaatacattctaattcctgttgatatgtcaaccccatatgaagcaagaatatcttgagcttctttttttaatttatcatcgatttttacactaatttgagccatagtacaacctctattcacaaaacgtattactttatctatatagtactatatactataaatacaaaatatcaatttttagcgtttgcttttaaaagaattttaaaagattataggtagtcttattatgaatactaggggaaaaaactaaaagtgacatttatatctttaatcgtaatacaccagcagaaatttaaacataaacaaagctcgaagcttctacaaattgtagtaacttcgagctttttgtaactattcagaaaagataatttagcggtcttcgtggttagtgaagtaacggtagtccttactcttgtcgaacaatacggcacgagcgttttcaccgttggagattgagaagatagcgtcagggtacttgttcttaacttcatcttctaccaatcctctaagcatttcgttgttagctaaaactgaaccggttaaagcaatcttcattggcttaggatcttcgtaacggtcaagaccgatgatgatgtcacgggctaacagatgagcttgtttcttaataactttgattgcatcatcgctgccttcatcagcaagttgtgcaacgtgaacagccattcctgcaacttctgggttagacatcttgtagaatttagcgttacattcatccatgtgttcaacgccaaataatttagtaaacatttgaatcaaagcgttgtcttcacgcttgtcccagctaagaagagcagattgcattgctgaacgagcaattgcgtaacctgagccttcatcacctaagatgttgccgtagccaccaactgcgattaagtggccgttttgtaaaccgttgtaaactgagccagtaccggcaattactaaggcaccgtcatcaccttcaagaccagcgtaaagtgctaaaagtgaatcagtaatagcacgagtaggtaagttgttaattcttgatgaaatagttgcggcaacttctggagcattaccgacaactgaaagaccggcaataccaacaagaacgcgcatgcagtcaccatcaaccttgtcgatcaattcgttgatagtgtcagagatattcttaattccgccttcgtagtcagcgttaatttggcctgggccgccttctgcacgaccgatttccttgccagtttcgtcatatgcgattgcagttgagtgggtaccacctgcatcaacaccaatttggtatttaagagccatgttgtaaatcttctttctatattaatttatccgaatgatagcgtatacattgtattatatttttatacagtaggtctagtaaaagttttgctgttagcgctaacagtggcttttttcttgcaaattaataaaattgttaaactaattaagctaaccaacatccccagtagaagaacccatggtacataaattaatgtaatttgatgttttcctggattcaacttgaagtttaaaaaagcattcatgaacaaggttttattcttgttaattattttgccattatctaaaactaaccagttaatgttattaggaatagttgacgccaatgtcatcatcttcttcgttgtgaaatgattagatttgatgatcaaagcaggtgtttgtttaaagtttggttgtttttgcttaaaacgatgtataatctgctcgagcttttgtgtgtttaagcgccagaagtgaatgccactaaggtctagtttatctttttttagttcaaaagtaacttgcaaccgttgaccacgctggtggctacctagattaatgagacgggcattttgatcacgtactgccagattaatattagcaccattaactgtcattgaaatggcattatcatcgatctcaccgggcatttcaatgtagtaagaatcatcagtctgtggtttgaaattgaaaatgatgcgtgcgatttgcttattgtttttacgattatattgtagttgatcgtttttcatactagttacattaattaattttgctttaggccaattgatctgcttaaacagctgcacttttgcccctgtaactgcttgaaagaatttggtttgattactagtaatatctagagagttaaaattgattttttgcgttttttgtgatgttaaaaagagtaggggcaaagcggcattatttttcactagatatagttgggaaaagcgtttttgcaaatgataatcgctggcatcaacgcggtggttggaattgtcatacttcatttgcttaccagacttgatcgttgtgatttcatcattaggcaaaagataatatttgattccaagtaaatcatctgtcaaagtagttccgccaaaattagtgtaggaattactattgtttagaaatccaagattgttgatcaggttgagtactttttgatcagaaatcgaattaaaattacttaaaccgtaataaccagcgctaaaaggatcatcatcagaacgatagaaagtcttttcagttcggtaaaatccagaatcatgttgatttgcgtattgtactgcttggctgacattagtggtaaagttctgataatcgctatttttttgataagctaaattgcctagagatagtactaggttgacgattaactcaagctcgataactaaataaaaaaatggcgcggcaaaactgtgttgatgataaataaagccaataaacaagattccgagggctagaaaagctcccgtggcaatctgcgcatcttcagttagaaagtcaaaatgtgaggcattaaatactatataaacaattaaacctaaagaaaatagagtcagaagtccggtctgccaataagctatacgttctttttgttctaatgcaataacgcctagatttagcgcaaaaaagatcaacacaaagctgaaacgaccaggataccagacagggaattggcctaaatgccagagtaaaaccagtggtgtccaaaaaagagaagcaattaagaaaatgagtaaaattccgtttgctaatttacgctgccagttaatctttttgcttaaaaaatataaaattgtcagcaacaagaaaggcattgtcagataaatgttgggcatcccttcctgcatttcatgaaagttataggccccttcggctaacttagtcagctgttcaactggagaaaactgccagcccaaattccatgaggcagtagaactagccttgccttgcaacatttcaatcagaacggggaagagcataaaggcatctaaaaatgaaccagcgatactttttcttaaataaatccagttaaggcgtaggcgctcctgcttattgatgaagaaaattttgcttaacagataaagcaaaccaaaggctaatgccataaatccggtataaaaattagtgaaccaaagcaaaaaggtaattaaaattaacttattttttcgttgggccagcaagcggtcgatggcattaatcaataaaggaagcaaaatcacagaatcaagccacatcagattatagtgattgccaataacgtagcctgaaagggcataagccgaactagccgctaaagcgtaaaagtgattagtgattttttgcttccaatagtagtaggaagatagtcccgccgctccaatttttaatgcgataataattaaaattgcttgtggcaaaaaatgttgcggaaataaaaataagagtagattgaaaggactgcagagataataggcatcagttgttagcattgaaccgcctaaaccattagaaaaggaatagattaagcgcaagggatgggagaacaaatttcgcctgaagaaggcaagaaaatcaacatattgttgacctaagtcgacagtgagcactccatttttgctgtagaaaaagtaactcaagaaaatcaaagccggtagcaaaaaactaagccagaaaaaaatatttttacgattaattgcaatgtgtcgtgagttaagaaatttaagcatcattaaaaattatataagctcccttatgaattgtagaattgatgtttactttttgttaaaatacatctagttttaataaaggtgatttacgtgaattattttagaaaaaatagtgggactggctcaaacaagcattcctcaactccaattagaatgcgaatcattctaggggtaattttagtcctctttgccatgttaattgggcaattggcttatttgcaactagtttatggttcacgtttcaaggcagaagtgcaaaaaactgattcaactgttgtttcgcatcaagtgccacgtggtgtcatgtatgacgctaagggacgcgttttagtaggtaataaagcaaccaatgctattacttatactaagagtgcctcgactacaacagcagatatttacaagatatctaatgccttgagtaattatatcaagattagcgatgaaaagccgacaaagcaaatggcagcagattattatttagctaatgaagataataatactaagatatctaatgctttgccgaagtcagccaagattgatgctgatggcaataagaagacttcagctgaaatctatcaagcggaattggcttatgttgaaaaaatgaatcctcaactaaccactcggcaaaaaacagcggctttaatctttaataagatttcaggggcttatactttatccacgatttatatcaagaataaaggcttaaccgatcgtgaaattgcccaagtaggtgagcacttatcagagcttcctggtgtgggtatcggaactgactggcaaagatcttatccaaatggttcatctattcaaagtatcattggttcggtttcaactgaaaaatctggtttaccaagtgatagcttgcagtactacttaagaaatggttactcacgtaacgaccgggtaggtacttcctatcttgaaaaagaatatgagccacttttgaagggaactaagtcgactaaccaggttattactaaatcgaatggtaatatccagcagactaagactgtttataatggtcaagccggtgccagcttaatgttaacgattgacgctaagtatcaaaagcaagtacaggctactttgaaacgggtttacagtacagctgttggtaacggtgcagcaagatactctaatggtgcctatgccgtggcgatgaatcctcagactggtgctttgctagctgtagccgggattaatcgaaacacgaacactggtaaaacgactgataatgctttaggtgtaattaaccaatcctttgttatgggatcagttgttaagggggctactgttggtggtggattaattaataaggttattactcccgaaaacaatactttgcctgatacggcaatttatttgccaggttcaccagttaaaaagtcagtttatccagttggtactttcagttcattggatgctgaaacagcgttggaagtctccagtaatatttacatgatgtacttagcaatgaaatgggttaaggctagttatgtaccgaagagctacattcatatgccaaacgatgcctttgacattttacggcgtaattttgctatgtttggcttaggtcaaaagacaggcgttgacctacctggtgaagtgtcaggaattgaaggtaagtcatttaatgacaagggtaatattctttccggttctgtacttgacctagcttatggtaactatgatgcttatacaccaattcaactagcccaatatgtgtcaactattgctaatggtggtaagagattgcaaccttatattgtgcaatcagttggtaaaactagcaaaaatggcaagaagatttacattagctacaataagaagccaaatgtccaacaagtaattccttggacgcttgcggaacttaatgtggttcaaacagggttctatcgtgttgttcacggtacaaatggttggggaactgctcacccattgaaaaatgttaagccatcaatttctggtaagactggtactgcacaaactttctactatgatgctgaacaccctaatagaaagcacaatatcgaattgattaatgcaacctttattggctatgccccatcgaaaaatccaaaattagcagtggcggttgttttcccaggattagaccctgatggtgaaggaacatacacattgcaagttgccaaagcaatggtacaagattatttcaaacttcattcaacaaaataaagaataatactggtcaaacagcttgaaaaatgctattctagtacagtcagaataaaagtgtaggtggtgaaaaaaatggcagataacatcattttagaatgcaccgaatgtggcgatagaagttacttatctaagaagaacaagcgtaagcatccggaacgtttatccttaaagaagtattgcccagttgaaagacgcgcaacacttcaccgtgaaactaagtaataaaccaagatagcaggttacgtgcctgctattttttgttttttggacaaaaagatggaaaaatcagaattaagaaaagaacaaatcagtaaattaaaagaatttgccaatactaaagaaaaaagagcagaagatgcgattttattagagaaattaatgtctacagatctaattagaagaagtcagacgattggggtaactgcttctttaccactagaagtagatacttctgaattaattgctcgtttgtgggataaaggaaaagaagtttatctggcaaaggcacgaggcgatcaaaatcatactttagactttttacgctatacgtatatgagcaaattggtaaaatctaaattcggtgtggaagaagtcgccgatgaagatgcgaaaatcaataatgatttggatttagtcattgtgccaggtttagcctttgccttagattcgcatgttcgacttggctttggtggaggttattatgatcgctttttggctaagcatgatcctaaaactgttgctttagccaatagcaagatgacgttcgatactagcatttggcctatcgaaaaaaccgatattccggttcaaacaattgttactcctgataaaatttattaaaatagtcacaatgacgaagataagggggattaaatgaatactcaacgaaaaattaacctctcacaatcatttgtgactttaggaattttagtagttttattaataatctttttagttgaagtgtttttaggtggctcagagaataccaatgtcttgatgaaaatgggagccatgaataattttgccgtggtggctggacaccaatggtggcgcctatttacggcccagtttttgcatattggcatcatgcatttggtttctaatgccattattatttactacatggggcagtatatggagccattaatgggacatgtgcgctttttagtaacttatcttttagctggggtcggcggcaatctaatgagcttggctttcagtgctgatcgcggcttaagtgctggtgcctcaacagccttatttggtttgtttggagccatgactgccattggcttgcgcaatttgcataatccaatgattgcttttttaggtcgacaagcctttgtcttagcattgattaacttagcgcttgatatttttgtgcctggaattgatatctggggtcatattggtggcttaattgccggcttcttattagcgattatcttgggcgatcgtgtaatgaagacctacaatcctaagtggcgcgtattggctgctgcagtgttagtcgtatatgttgtttggacggttagaacaggaatgataattaatttctaatgaaaactctctacgatgtacaacaattattagaaaaatacggaattttggttcatgttggcaaaagaatttggaatattgaattaatggctttagagctcgacaatatcaatcgtgccggtctgattgaccaacatgattatttgattgccaagatgattttgagtcgagaacatcgaattgaagtcaaaaatgaacaaaaaaaggcgcttaaagatccgaaaaatgatagccagtaaattagtttagcggtatcataatagatgtaagtttttatgaaagggcagatttagtttatgtcgagttttttaattgtcttagatttagttttattagtcattattttagtcatggttggtatctgggcttggaataaaattcaagctaaatcaattggtggcgaattgactaatgaagaatttaaagaaggcatgcgtaaggcacaaattattgatctgcgtgaaaaagaaccgtttaaacgcaagcatattgatggcgctcgcaacttgccatataccatgcttaagtatcaatatactgagcttagaagcgacttgccagtttatctttactcagattcaaagaccattactttgagagctgcccgttttttaaagaaaaagggttttgtttctatccattggcttaaagatggctttgaagcttgggatggtcgaactaagaagtcaaaatattaaatgaaaagaagacgcatttggagggggtaactctaatgcgctctttttttgtatcaaaattaagaaaggtgatggggatgaaaaaggtactagcgattgtaggaccaacagctattggtaagacagacttggcgattgatttagctaaaaggttgaacggcgagattatttctggcgattccatgcaggtttaccaagaagtggcagtgggaactgcaaaggcaactgcagaagaacaagcgcaagtgaaacactacttagttgatacgcaatccgtttttgacgagtattcagttaaagattttgtggatcaagcaacaaaagcgattgaagagattagccaaaaaggtaagttaccaattattgcaggcgggacaggtttttatgttaatgctttattgaataagatgcagctaggcgagaaaactccagaagagcgtagcgtttcgcaaaagtgggaaaactacctcaaggaaaaaggcgcagaaaaattgtggcaggtcttgaatgagcaagatcctaaggcggcagaaaaaataccagtagccaatagtcgcagaactatgcgagcattgactgtgattgagcgtacaggcaaaaagttttcagagcaacaaaagcagatcgagccccgttatgattacttgattattggcttgaattctgaccgtcaagagatatatcgcaggattaatttgcgtgttgataagatgatggagcaagggatgctcgatgaagcaaaatttatttatcaaaatcgagcacgagagtatcaggtcttgcaagcaattgcgtataaggaatttttcccttattttgaagggcaagagacgctagagcatcgcattgaagatttaaagacagcttcgcgccgctatgctaaacgtcaattgacttattttagaaataaattaccagtagtttggtttgatccgttagatgatccgggttgcgaacaaaagatattgaagaaagtcaaggaatggaaaaatgaataatttgccagaaaaattacaaaaaattgttaaagaagttgatcaacagatcgcacctaaactggttgagattgaagatcaaattgtctataatacggctaaagttttggcggcttaccaagctaatgatgtcgctgaagccgatttaaatggggctaatggctatggcgacgatgatatgggaagagataagctagataagatctatgctcaagtttttcaaactgaagatgcggtagttcggcctcaatttgtttcaggtactcacaccttgtttgtagctctagcaggtaacttgaaatacggcgatacgctaacttatttaactggacagccttacgatactttgcaaaaagtgattggcttgactgatgataagcgtggtactttagtcgagcgcggcgtgcatttttcatatgtgccgttaaccgatgatgggttagttgattatgacgaggctgaaaaggttcttaaacgtgatcagcctaagatcgttgccattcaacgttcacgtggctactccaccagaaagacctttacagttgatcagattaaggacatgattgcctttgttaaacgggtcagccctaagagtattgtctttattgacaattgttatggcgaattttcggaaaaacatgagccaactgagtatggttctgacttaatggcaggatcgctgattaagaatgctggtggtggtctagctaagaccggtggttatattgttggtaaaaaggacctggttgaaaatgcaaaacttgcattgactgctccaggctgcaccgatgagggcgccactattggcaatttgcatgacttttatgaaggctttttcttggctcctaatgttaccggtatggctgaaaaggggatgatttttgcggctgctttgtttgccaaaatgggcttgaatgttaccccagcttgggatgagaagcgaagcgatattattgagacaattatttttggtgatcctgataagatggttaaatttgtgcaagaagtacagaaaaactcaccgattgattcctttgtaacgcctgaagctgtgcatatggagggctatgaagataagattattatggctgctggtaatttcgtttccggttcaactattgaattttcagcggatggtccaattagaccaccttatgcggtttatatgcagggcggcttgacttatgcgcatgacaaagtagctattattaacgcggttcgtgatacattttttaacaaaaaataaaatttaaaaataatcactagaccaatttgacttttttaaattggtctgctattgtattaaacagttctaggagataagaataaatcataggaccataccaatttaatattttttgtttttataggtgaattaactatgagtaaacaatatactgcagaagaaattaagcaagaagttgaagacaaggacgttagatttttacgcttggccttcactgatattaacggtactgaaaaggccgttgaagtacctaagagtcaattagataaagttttgactaatgacattcgctttgatggttcttcaattgatggctttgttcgtcttgaagaaagtgacatggttttatatccagacttctcaacttggacagtattgccatggggtgacgaacacggtggtaagattggtcgcttgatttgttcagttcacaccactgatggcaagccatttgctggtgatccaagaaataacttgaagcgtgttcttggtgaaatgaatgaagctggattcgacacttttgatattggttttgaaatggaattccatcttttcaagttagacgaagatggcaattggactactgaagttccagatcatgcttcatactttgacatgacttcagacgatgaaggtgcaagatgccgtcgtgaaatcgttgaaactcttgagggcatgggctttgaagttgaagcagctcaccacgaagtaggtgatggtcaacaagaaatcgactttagattcgatgatgctttgactactgctgacagatgccaaacctttaagatggtaacgcgtgcaattgctagaaagcacggtttgtttgcaagctttatggctaagcctgttcaaggtcaagctggtaacgggatgcacaacaacatgtcattatttaagaatggcaagaacgtcttttatgacaaggatggcgaattccacctttcaaatactgctctttacttcttgaatggtattttggaacatgctcgtgccattactgcaattggtaacccaaccgttaactcatacaagcgtttaattccaggttttgaagctccagtttacattgcttgggctgctaagaaccgttcaccacttgtacgtattccaagtgctggtgaaatcaatactcgtttggaaatgcgttcagctgatccgactgctaacccatacttgttacttgctgcatgtttaactgctggtttgaatggtattaaagaacaaaagatgccaatgaagccagttgaagaaaacatctttgaaatgactgaagaagaaagagcagaacatggtattaagccattaccaactactcttcacaacgcaattaaggccttcaagaaagatgatttaattaagagctcattaggtgatcacttaatgcacagcttcattgaatcaaaggaattagaatggtctaagtactcacaatcagtttcagattgggaacgtcaacgttacatgaactggtaaaaataaataagtaattggaaaatctcgtggtgattgaggccacgagatttttttgtaaagtatagatttttcaaaagcatatctaatcgtaattagtctaattacgattagataagtgaacttatggataagtttttaaatctagtaggataaacttttaccaaaaatcaaaaaatattctcttcaaagaagagcaaactgctatataattgtaataatgactggactggtatccctaattagtttagggatacttttgtgttaatgagaatgtattggagtcgatggaatgagaaataagacattagtagcattttgtttgatagctgcaatgatcaatttaactgcttgccaatcgcaaaagcagactaataatcgccaaactattgaaaaatctggtgtgactcagaaacagactcccaaaagattaattgttaagagtatgtcagatactgaaaaatctagtgcaatctcaatttatggatcgatgaaatatggggatgcatggaagactgcatatagtgatgccaagaaaaatcatttgagcattagtgtaaaaaatcgaactggttttaattggataaaaaaaggtagaggttacatttatgaagtaactggcaatggtcaagaaaataatgctttttatacaatgaaaagtgaaaccgtatatttttataatcagaagaaaaatttaggtgtagcaagtttatctgaaatagcttcatatttaagtgaacataatcaagtaaaatctgtagaaaaattagcaactaagactactttggctgctgaagttacatctgacaaatatggggttaagggtgacgatggcctagcattagttccaacgagactttggggtacttggtacaactataaaggaaagaagttagtaattactgatcatactgttaatggtgaagaaattcatcatatttctaattctggtgtagcagcagaatccttagatcaaacgaaaaagtgggctagagctcggatcgaaaatattaatggattaaattgctatcatgttcaaacattgaatgctcaagattttggcttactttattctgtccaaaaagataatggcaatacggcagtagtaacttatagcgttgatacaggtcattatacggctacttattggaagagcaccaagatagccaaggaacaccgaaatgcagaatttaagactttaaattaatatttgtaaagaagtattaaaataattgcaatgaacaagaagtataatttttgtaaaataatcatgtaagaagttggcggatcgtattttttataatactattaagcaaagagatagaattattgaaagaaaaggggattccttttgaaaagtaaattaactgttttggttgcaatttcagctgctttaactttagcaggatgtagccaaagtacacaaggtaatagtaattcacaatcacagtcagaaaaatcaagtcaagtttctaagagtaactcagaaaaaactggcacctcagaatcaagtaacagtcaaaactcagcaaaattatctgctgagaatatggactataagacgcaggctagtgcaatctctgtctatgctgcacaaaagtatggcgacacttggaaaattgcagttaatgctgccaaaaatggtaatttaggtgttgcgttcagaaccaaagccgcaacaggtattacttctgatgactcaggatatgtttatgaggtctccggtaccggtaaaagcagtaatgctcgttacatgctaaacggagatggagcacaaaagaaaattactatttttgttaagcaaagaaaccttggtactgtaactttacaagatgtagttgattacattaataaaaataatgatgttgatctagttcaaagcttggctaaaaatgccaaactaaatgttaaacttgaaggcgataatgacaatgcagctggtgctaaggaatctgctagtgccgtaattccatcaagcttgcaaggtacttggtacactgcagatactggcaatggcaatatcgatactttgactgtaactgctaataagatcaatgatgaagctggttttagcatggatgtaaaggctaaaaattcaggttcatcaactagttcaggctatatgaaacaagctactattaatggaattaatttctatagttttactaatatgggtcaagaaccaggtcaaggcagtacatatttggcaccgcatactgaaaatggtcaaagtgtaattgtttcagctaactctaagggaacaactaatgctgtctactggaagagcgaagccttggctaagcaaaactccaacaagcaatttagcgatctacagtattaaaagtgaataaaatatagaattaggcgatatctttgtgatatcgccttttttgttgtgaaaataaatttctaaaattatggcacttcctttcaaaacatatgtttgatataattgtaaaagtgtttgggcagactaatgaactgactattgagtaataaggaaaggaattatatggattttttagctcaaaagaaggaataccgttttaaaaatattgaaaatcaagtgtgtcgtgttcatactcatttggctattaacaacaataatttgaaagtttggagagaaaatgatgataagaaaagtagaaaggctactaagttaataatggattcactacaagatgacaataaatacatgtttcctgatttagtaatagttagttcaaaatatttgaaggtagtagctgcttacgatcgcgaaaaagatgttatttatgttaataaaggtatctatactcatcaaattgttaaatcgcatttaaagtcaagttatttcgttgctaaagatatgagaggaattttgtggcatgaatatggatataaattacattgggatgcagttaaaagcttttataaagtacataaaagtaagtataatgatatatattaaagaagcaaagatgttttttgattctaaacttgagcattatataaggctacagtatcctggttatcttaggaaagtaatcagttcgtatgcagaagatagttactttaaagaacataaaataaatgaggtagtagctgagttttctgtgataggaaatacgtgtgataaagaattgaatacaattattagggggatgctagaaaatgcaagtgctaaatgatttgaaaatgccgaataaagaaacactatattttaatgatcatattgtcccttggatagaaaaagaagagtgggctaataatgagcatacagaagtcgctttaacttttaagaaaaacaccccagtagatattattaataaatttttgatttgtcgatctgaattagcctattaactatactgcagattataaaattgtataggaagaccacatgttgtatccatatgcagaatttcctggggaattgtcaattacatattctcaaataatggtagacgataatgtaaagggtggtaaaaagcttttggtccactttgaacaaccgacagattatggatttaaagaagccagatatgagttgcctgattataaagaaatttacaactacgactttacaccttctgaaactagaaataatctagatattattaagagaaacgaaagtctaatttggaagtgtgccgaagaggagaaaacaagtacctaattattttcggcttaaaaattttactatgactacaattgattttcatgactaataagaagaactcactataagtgggttcttttttaataattacaccactataatatcttaagtaaagctaaaaatgattcagttagaaaagagtaaatatgaaagtcttaaaaaaagtgggattagcgttgttgtcagtgatactggcatgtgtaattatcttctgtggctattatatatatttgtctctacattattatcgaattcctgataatcaaagattgaaaattaataacaatcagtctcagttattaaaagcgggggcgtagctataagacaacgacttataatgttggctttggtgcttataatcatgatttcgacttctttatggattcaggtcagttgaaggatggcaagaaaccgcaggggcatcgagggacagcaatatctaaacaagcagttcttgattccactaatggtgtcattcaaacaatgaaaaagcagaaccctgactgcatgtttttccaggaaattgatactgattcaactcgtagctttcacgttaatcaggtgaaaaaggttgaagatgattttccaaaaatggattcaacttttgctagtaatttccactctgcttttttagcggttccattgaacaatcctcatggcactgtacgttcagggttgttgagtatgagcaaatataagatggatagtgccataagaagaaaatatcctgtttctagtgggcctattgaaaaatttgtcgatttagatcgttgctttgtagttatgcgctttccagtaactaatggaaaagatttggtaatgattaactcacatatgtctgcttatgataagggcggtaaaatgcgtaaggcacagatgaaactgatttcttctgtgatggaaaaagaatatcgacgaggtaactatgtcattgtcggcggcgactttaatcatgcgttagggaaagacatgatgactcattttgagcaccaagaagaaattcctagttgggtatccgttcttgatcaaaaaatgctgcctaaagatttcactatgattaaggcgcaaaatcgcgaaaatgttgcgactgttcgtgctacagacatgaaatatgatcctaaagttaattatatgaccatttgtgatggctttattgtgtcgaaaaacgtgcaagcaaaggcgtataacattaatactcattttgagtatgcagaccataatccggttaggttggagtttgaacttaagtagatttggacaaaatgaaaaacactggatcatgaaactgtagatttatgatttagtatttacgaaattaacttatgaggtaaaatctaatgaaaaaagaattatcatataaaggttattatggttcagtggagtattcattagaagatgatactctctacggtaaagttattgacatcaacggtcttttatcatatgaaggccaatatggggtgaaataagatgagtaagattcaagagttcatcaagaaagatattgagagacatccagaattaaaaaaagaatatgaacaggtagaccttgatttagatgcttcagtattagttaaagatatgcgcgaaggttgggaaatgagtcaataagactaactgaagaatagttagtaaaataatgaaaagcattaaaattatatttgacttttaaaatgatttagactattatcttaatcaacataattattaattatttagcgatgataaggaaagtaaattggcggtccttctacagagagttatcacttggtgaaagataatgatcgacctacttttgaaaatggcctttgagcttgaagctatgaagtttttagtagcttctgggtccgcccgttatagcggtaacgtatcgccagacggccgtacgcaattcaaggtggttttccataaagataggtggtaccgcgttactgaacgccctattagatcaagttgatctagtaaggcgtttttctttttaccgtttttagcaaaggagatttttatgagaataaataaaaaagttgtttcattcggattaatagctttaactacggcaaccttagctgcttgtggtaagcaatcagatagtaataccgtttcaaaaaagcaggttttaaattggtcagagatcacacagctttctacgcaggatccttctttggcaactgatactaccagttttcaagctcttcttaataccggggacggactataccgccttgataaaaacaataaaccgcaattatctctagctactaaggctaaaacttctaatggcgggaagacttatgatttttatcttagaaaaaccgcaaaatggtctaacggcgatccattaactgctaaggattttgtatattcttataagcgtactgttaatccagtaactaagtctcagatggcattctatctttaccagatcaaaaatgcgcaagcaattagtaagggccaaaagtctccggataccttgggtgtttctgctccttctaaatatcatttgagaattcaattaactagaccactgccttacttcaagattttattgtcgtggccattatttttcccgcaaaatcaaaaagtggtgcaaaaatatggcaagttatacggcacgcaagctaaatacacagtttcttcaggcccattcacgcttactagatggaatggtaacaacaagacttggactttaattaagaataagaattactgggatgctaaaaatgttaaattaaataaagttaatgaacaggttagcgaatcaactacgactagttataatctttttgaagcaggtaaggcagatgagactggacttactggtgagcaagttgccgcaaataagaataaagcaggctaccatgcacgtttgtcttcagcgattaaaagattggaacttaacgaaaataaggttccagcattcaagaatcttaaggtacgtcaggcattttctttagcaattaatcgcaaacaattagcaaataatgtcttaaaagacggttcaatcccagctaaaggcttcgttccatcaggtatgggcaataatcctaagacaggaacaccatttgaagatgatgcttacgttaagagtgcagtatcgtataatcttgctaaggctaagcaattacttcgcgaagggtataaagaatctaagactaactcaattaaaattaccttgttagtttctgatgacgatacttcaaagcaaacagctgaatttcttcaaagtaagctagatcaacttccaggtgttcaaatttctgttcaaacaattccatatactcaattgatttcacgtcaaacagctggtaattaccaagctacaattaaaaactggcaggctgtctttggcgacccaatcaacttcttggacgttttccaaaaaggatcaagttatttgaacaatggttggaataacaatcaatttaacaagctgttgaatgaatcagaaaacgtatatggcaatcaaccagtaaaacgctgggcaagattagtagaagccgagaaggtattgatgaaagaccaaggaactattccattagttcaagttgctaagccacaattattaaagactaccgtaaagggcgtttcctttaaccctacaggcgttccatacgattttaagaacgttagaattggatagaaaaatagccgttgattacttgtataaaaaacaagttttcaatggctttttttctgttttgtgctaatacctaaaaatatccagttagatttcaggtaaaacacttgaacaaaacaaaaacgccttcaataacagaagacgttttctagagtgcgaagtattatgaattatccaattaatctcttcaccataattattatatcaggtatataaggttaattggttaatactatctatgaaatatagttaaatcagatataacaaacgataatcatatcaggctatttgttgtatgcatcgtatttttcatttaagacagaagtaatagttcgagtcattctatcgtgatatttattattctttaaaagtagcgtagtaattacgtctattacatacattattgaaaactgtgagttaataaaccgagcgtcgttaatataatttgtatcttgaacaccaactacaatatcagcaagctgagctaatgggctattgtcatagctagttaatgctacaactgtagctttattcttttttgctagttcaatggctcttaccaaggaatctgtgctacctgttgaagaaatagctataatcaggtcatcttttgaaatgatactgctagtcataaacatattattactttctgtttccgcaaacgcagatatacccattcttagtaatctttgagtagcttctaagctggtatatccagaagaaccgataccataaaaataaactctctttgcagatttgatgagttggattatcttttttaattgttttatatcaagtttattttcccggatttaaaattgaagtgcaacactaagtgttaaacaaaaaggccatgaagacctaaacttgaagtgacgaaaaatcaagaaaggaagatctttatgaccaattcaaattctagcatttctaagcactatcatcaattaaccagcgtacaacgtggacaaattcaagcaatgctggattccggcataacttcccgtactgttatcgctcaagaagttggctgccataagtcgacaatcagtcgcgaaatcaaacgcggaagcgtcctgcaaagagacagcagctatttattgtatgagcactattacgctgatactgcacagatttattatgagaagcgtcgcaaaaactgctatcagcgcaatccattgaagcattatgctgtctttttgagaatgctctccagacgctttaaagctaaatttgatgccaccagcatcgatgagttcgttggtgaattcaaaaggactatgccaggctacccttgtcccagcacaccaaccgtctatcgctatattgatcagggcttgctggacataagcaatattgatctgcctatgaagctcaaaagacgcaggaacaagcgtcatcacagccatggcggtcacgctttgcacaagaagcatcttggcaattccattgaacagcgtcctaaggaggttgaagacagaaaagctccgctgcactgggaaggagatctggttaaaggcgtcagacgcaagaatcagcctgctttaatgactttgactgaaagaaccacacgctttgaagtagttatcaagattcctgactatcgggcaagcacatgccaaaggctgcttcaaaaggagattgacagacatcctgcctggtttaaatcaatcacgtttgacaatggctctgagtttgcggatatgaccaagatcaagggctgccagatttactttgctcacccatattctccatgggaaaggggcaccaatgagaactgcaatggtcttttgcgtcaattcttccctaagggcaagagcatgaaagacaagtcaaaagcttatgttcaacaggcaactgatgccattaaccacaaatatcgccgaatcctccaatatcacacagcagaggaactcttcaagcaatatatctcttcataacctaactgttgcacttaatttgacaattcaggtcaagtttattttgtgtttcagatagaactagattgtaaaaatcatatacttggtgagcggtcgttttagagttatcttgattagtaatagtatttacttgtgaagaagctgcagcagcagccaatttgacttttaaatctgtaaaactagagcagttaactctacgtgcaaatctagtaatagtagcattactaacttttattgttgacgctaattgatttatatttgctgattgaataaactgtgggtcctgtaatataaataaagcaatttttctttcttgctgaggtaaatcgggtagcctattttgtaaatcagttaaaaacgtcatattgaaaaccttcttaatgtgttaaatcaaaaaaacagagaaagattttgtaatctttctccgcttaattatgctaaatttgtagttttttggcaaataagcaattacttattaaaatatttagcgtagatttcgtcagcgccttcaataactttatcagtgtatttagccattggttcacggttgtagccagcatgtacgcccatcttttgcaatactaacttaattgatgggtaaataccgttattaagaagggcagtgataatgtcgttcttcttgtgttctaattcttgtgccttagcaatgtctccgttgttgtaagcagcaatttcttctttaaccattcttgcattaacgttgtaggttgatccgatacagccatcgacaccttcaattaaagcaggtaacaacatttcatcgaatcctgaaagaataagcttatcagggaagcgctcacgaagtctttcaagtaagtagaagtctgcattagtgtacttaacaccgataatctttggatttgagaataatttagcaaagttatccaatgaaagtgaaacacctgttaatgcagaaattgagtaaatcaataactttgcatctacatccttaacgatttcatcgtagtaatgcttaatttcgtcgaaggtaaagttatagtagaaaggagtaactgcagaaattgtcttgtaacccaattcagtaacgaacttagctaattctttagcttcttttaagtttgggccacccacttgagcgatcaagtcaacttgttggtcaacttcgtcccaagcaatttcgaagatcttcttcttttcttctaagccaagcataaagttttcaccagttgaaccgccaacgtataacccgtcaacaccttcaacatcgatatcgtgacgaatgatttcacgagtacctttttcatcaatattaccatcttcatcaaatgaaaccattaaggctgcataaactttttgcatttgtttgacctccgtttagtcaaaataaaataatatttttttaattactgtataactaatggcaaattcaaacaacacctgcagtatagaacatgaaaacgctttacgcaactctaaattgcgaaaataattttcagaaattgaacaaagcgtaggtgtatcaagagatacagagcacgaaaattattttctaaatttttatttgagaaaattgtttttaaatgatactatgaaagcgcttaatataagaacttgattatacaggaaggcgtgaaccaaatgagtaagaaatatttagcttttgatgttggcggaaccacgattaaatacggtattgtagatgagaatcttcagatttcagatagaggcaaagttgatacattacataataaggacggacatattttgaagtcacttattaaagttaccaaagagatgatacagaagtatcaattagatgggattggtgtgagtaccgccggtattgttggagacgatggaagcataatgtatgctggaccaactatttctgactatcaaggtactcccattaagaaagagctagagcggacatttaaaattcctgtcagtgtcgttaatgatgttagtgcggctttattaggggaaaaattagctggaagtgttaaaaatgctagtactatctattgtgttgcattaggaacaggaattggtggtgcattttgggcagatggacatttatttaatggatatcatcaaacgggtaattcaataggatatacattatttgatccaataacatcaactaactatgaacagcggtcatcaaccattgcattacaaaaagaattagaacccttaggtattgatcctattgaagcctttgcacgtgccaaaaaaggaagccttagagaaaagaaaattattgatgcttgggccttgcaagttgcagagggcttaagcagtgtattattacttcttgatccagaagtattagttattggtggtgctgtttccaagcagggagattatttaaaagatttgttggacgaaaaattgaatcagattttaccgccaaatctatgtaaaaccgtattaaagatggcttctttaggtaatgatgcacaactttatggaggtatttctagcatttttgaaaattaatttctagaaagcgcttgcaataaaattgttttcgtgtatgctagaggtgtattaactaatagcaaaattcaaccgtacttatgtgaggcaaatgctgagcataattgtacggtttttttaatcccgtttattgaagaaaagaggcaagtcatgaaagtttcagtgaatgcggcaatctttgttgatcgtttgaatagcggagagagtcaaattgattgcttagaggatgtttcaaatttgaaagataaaattgacaatatccaagttcgtggagaattctttaaagaaaacaccaaagacgacgaactcgaagcaatcaaagcattgtgtaaaaagaacagttggggattgtattattcagttcctgaacaatttttcattgatggacatgtcaataacagtttgaaagacaatgttgaaatggcaaaaaagcatcaattgaagcatttgaagtatttcgtaggtgacgttaaagatgttgaccaaaaggaaattgaggatgctgcgaagcttcttgaagatgctaacgttgatttgacattggaaaatctttctaatgaaacaggctatttaagtactgttcttaaaggtcttgaagcagtaaatcaatatcctaatattggcttcacttatgatgcaggtaattggtactgggttggtgaaaagcctgaagttgcctttaaagaattaaaagataaggttactaactatcatctaaaggatattaagaataaaaaaactgtgatgttaggtgaaggaactacagattgggaaccaatgattttaggacttgatcctcaaattccaatcttcctagaatatggcattgatgataacaagattgaacaagaacttgacaaggtcaatgctgttatagacatgcggtaggtgactttgatgacgtaccttgtacaactatttttgattctgctattaactaaaattgcggcacacttttcagttaaggcaaaaatgccaagtgtaattggagaattattagtcgggattttagttggaccagctattttaaattggattcagcccaccacattcattaattatttttctcaactaggtgtaatcgttttgatgttcattgctggcctagaaggagatttgaaattattaattaaatattgggctccagctttaactgtagctactttaggagtaatttttccaactggtacagcatatcttctgtgccatacggcttttggattttcagtaaaagcatctatatttatgggcttagttttaagcgcaacatctgtaagtattacggttcaagttctaaaagaaatgaatcgtttaaatactcgtgaaggtgcaattatctgtggtgctgctgttgctgatgatattatctgtgtcattttattaggaatttgctccagtatctacggtggtggtcaccatacatcaatcattaaaatgatcattccgatggtattattctttatcattgttttgcttattggtaagtatgttgtgccaaaattcttagatatttttagtgatcttaatgcttctgaaagtgatacagctggtgcgatgattctttgttttggtgcagctgccttagcagttgcaatgggaatgagcgatgttttaggcgcatattttgctggtttagcaatttcagaaactaattatgcagacagattatcaacaaaaattgagccaattggttatgcagttttcattcctgtgttctttgtaagtattggcttacagattagttttaatggcatgggtaaggacttattgtttattgccttactaataattatagccatcttgggtaaacaaattggttgtggtatcggagcaaagatgttccatcttaattggacagaagcaaatattgttggtgcaggtatggtttcaagaggagagatggcactagttgttgctaatgtagctcttcaatcacaattaatagatcaaaatcactatactgcaatgattgttgtcacagtaatcacaacattgattgcgcctattatattgaaacttttcataatgcgaacacaaagaaaagaagtaaaaatgaattaaataaaaggggagaaaaattatgtcgaaaacaggattcggtatgtggaacaggatcgtcttaatcgcatatttgctagcgatgttaggcgttggtgcttactttactaaacgggcaagtaaaagtacagattctttcttcaaagctgaaggtaaggtgcctgcttgggctgcaggatttagtatttgggctactactttaagtgcgatcacgttcatgtcaacaccagaacaagcttttttaactgactggggttattcgattgggacgttaacaatttatttaattattcctatattaattaaatggtatgtacctttcttcagaaaattacaggttactactgcttatgaatatctggaaaagcgttttggaccagtgatgcggtcactcggaagtttgctatttatgctttatcacattggtagagtagccattgttatttacttaccaattttggctattacttccgtttcaaatattaatccaatattgattgctgttttagttggtgcaatgtgtattatttatgcattcctcggcggtattgaaggtgttatttggacagatgttattcaaggtttccttctccttggtggtgctttattaatttgtattttagcagtcgtatatactggtggacctgggaagatcgcacaagttgctgtagataattctaaattcttatctgctaaagattggaatcctaacaatttagctatgttcattccagtaatctttgctggtcaattcttcaatagtatgtatcaatataccgctagtcaagatgttgttcagcgttatcagactactccaagtattaaagcaactgccaagtcactttggacaaacggttggttagcaattgtaactatttttgtattctttggtatgggtactttcttgtattgttattaccacacgatgggaagtttaccaaaaggttttaacactagtgctattgttccatactttataattaccaagattccagcaggtttagccggtttaattattgcaggtatcttcgctgctgctcagtcaactattgcttcaagtttgaatgctatttcttcatgtttcgtaactgacttcaagcaaagatattttgataagaaatggaagatgaatgatgttacactagctcgtatcattattgtcatcgccggtgtatttagtttaggaattgctatttacttgttgatgggtaatgcatctcaaacttggaatatcttcctttcaattactggtttgtttggtgttccagttgctggtatttttgctgctggtatctttactaagtcagccaaccgtgttagtgctgtctggggcgtattaattagtgctgctcttacttattggtgtcaagtaatgggtgttgcaacattggtacaaccaattgtagccttcattagttcattcgtaattgcttggttaattggtttggttactccaaaatatgcacatgatatcacaggtttaactgctaaaactatcaatgagaaggttaaggattagttgaaaaaggtgaaactataatgaaagattcaatgtccttaaaagatatggagtcatatcgaggtagattagaagttccagatgattttgatagtttttggagcaaagaaatcaaaaagatagaagcaaagccatttaaattaattaaaagaaattttggcgataatattaaaaacgttgttttttatgatttgttcttcaaaggtactgataacggaatagttcatgctaaatgcatttttccagcacatgaaaaaaatattccagtagttttctatttccatggttacatgggacaagctctcgattgggttgatttcatgcaatatgctgcgataggtgtaggcgttgttgcaatggatgttagaggccaacaagggcagtcggttgataacggtacttatgctggaaataccgttttaggccacataattcgtggagcagtggatggaccagatcatctgttttataaaaatgtatatctagatgtatacacgttaattgaaacagtcgcggatatgtcacgtgtagacaaggaacatctatattcttggggtggatctcaaggtggtgctttatctttgattgctgcggcattaaatccacgtattaaaatgtgctactcaatacccgtttctttctgatttcaagcatgtactagaaatgggtgatcgaggattgccatatgatgagttatttaggtattttaagttttatgatccatttcataagacggaagacaagttgatgcgtactctgtcttatatcgatgttaaaaactttgctcatagaataaagtgtccagttttaatgtttacaggacttgaagatgatacttgttttccagcaacgcagtttgcaattttcaataggatagaaagccctaaaaaacacatgctgttaccagaatatggtcatgaagcaatgttttattatgttgatagtgccgcatttaactggctatttgatactaagttcccagaaaatccaccggacactagtagtaatgctttagaataaggtaaatttttaggagataaaaatgaaaaaagaagagtttattcaaaaagttcataatggattaattatttcttgtcaggctttacctggcgagccactttacaccgaagagggtggcataatgcctctgatggctaaagccgctaaagaagcgggtgcagttggtttgagagctaactccattagagatattaagcaaattaaggaagtagttcctgacctgccaatgattggtattattaagaaagaatatccacctgagaagccatttattaccgctactattaaggaagtagatgaattagctaaaacagatgtcgaagtaattgcacttgattgtacattgcgcccacgtcatgatggtaaaactgttgcagaatttattgatgaaattaagactaaatatcctgaccgtttattaatggctgatacttctaactttgaagaagcaaagaatgcttatgatgctggtgttgactttgttggtaccactttgtcaggctacactgaagaaagtcctgtttcagatcatccagattatgatttagttaaagctttggttgatgctggaatgccagttattgctgaaggaaaaatccacagtccagaacaattaaagaaaatgattgatattggaccagccggaattgttattggtggtgcaattacaagaccattgcaaattgctaagacatttacgagtgtttttgaataaatgatcttctgattagttataaatttcccctctcccaaaacaagctacgtttgtaaaaggcagacgtagcttgtttatttttggttataaagtcgaatttttatagaaaaagcgaggtataaaatgtcatattttattcatgcaaagaagttttatttagatcatggtgttgaagaacgaggatacttagaaattcaagataatggacaatttggattttattattctgaagatgaaaaaccaaaaagtgctgcaattttagatttcaagaatttctgaaaaacttcttcaatatggtgtaacaagttggatgccgaccacagtaactacttcatctgagaaattagatgaaatttgtaaaacgtttgctgcacataaagggcaggaaaaaggcgcaaagatattaggtattcactttgaaggctcatacttcactaaagaacatggcggtgcagaaaatcctgagtttatggaggatccttcaattgaagaatttgataagtggtacagagattctgatgggatgctgagaaagatatcactagcaccagaacgaaaaaatgtcccacaatttgtcagacatatcgttaaaaaaggcgtagttgcttctttaggacatactagtgcaacatatgaagaagcacgaaaagcccttgacgcaggagctacaatgtttaatcatacgtttaatggtatgaacttattatctcagcatacacctaatattattggctgtgcattaacagctgacgatgtatttgatgaaatgatagctgatggtcaccatataaagccgatcattttgcagatgttgtttgatttaaagggacctaatcatattgtattaatgactgattgcttacgtactggtgggatgcctgatggtgaatatgtgcttagtggtatgaaagtaacagttaggaatcacattgcattgttagaaaatggtaaattagctggcagcacattgactttggataaagcagtaagaaacttagtaaattgggaagtatgtaagccatatgaggcaattaagatggcaacatatactcctgcacgtagtctaaatgaaaactgtggttgtatcctgccagatagggatgctgattttaatgtgctagatagtaatcttaatgttctaaagacttttgttaatgggaaagaaaagtatagcgtaaagtaaaaatattattatagtgtgaaaaaggcataggttgtgatatgaacctacgccttttcttatagttaatgtcttctttatctacttgaataatgattttctaacaggaaattgtaaagaatttgagactgtaaaatagtttgtgtaaggatgaataattccttaaatttatttcttaaaacattagaaaaaggagttcctttctcgtatgattggtttgaacaaaaaaacacatacagaaagaagaactccttcatgaatgattttaccaaaaatatagcacaagctctattcaatcaagacaaaataaacgatttattgcgcaaagagctacaacaggctgttaataacttgctagaagctgaattgactgcctttctgggctatgatccctatgccagaaatggctggaatactggcaattctagaaatggtgcttatttccgcaaggttgatacccagtttggaccaattgaagtgcaagtgcctcgagaccgcaacggtcagtttcatcagcacacgctgcctgactacaagcagcactctgatgttttggaaagcacgattatcaagctctactccaaaggcgtaactaccagagaaatcgctgacttgattgagaaaatgtatggcagtcattatagtccagctcaagtatcaaatatttccaagcagatgctccccaaggttgaggcttatcacaagcgcaagctaagcgacaagtttttctgtgtctatttggatgcgacataccttcctttgcgccgagaaacgtttgagcgtgaagcagtatatattgccattggcattaaacctaatggacataaggaagtcattgattactgcattgctcctagtgagaacattgaagtctggacagagatgcttcaaaacatgaagtccagaggcttgaagcaagttgaactctttctttctgatggtgttgttggcatgaaaacagccttggccaggacttatcctaaagctcattttcaacgctgcttggttcatgtcatgcgcaatatctgtgctaaagtccgggtggatgaccgcgaaaagatcatgaacgaattcaagcagatacatcaacagacaagccaaaaagaagctgcagctgtcttgcatgaattttatgcaaaatggaataaagcttatagccatgttatcaaaggtttgagggaaattgagcccgatctgctggtcttctacaattatcccaaacaaatcagagcttcaatttattcaaccaacatgattgaatcctttaacaacgtcatcaagcgtaaagctaagcctaaggcagaatttccaactgaacagtcgcttgatgcatttattggcatccaggcaatgagctacaatgaccgctatttcgaccgaattcataaaggctttggtcaggttcaggataccttagaatcctattttgattaaataaatgattaaaaaatcaatttacgagaaagaactatttacacaaaagatttgacagtttcgattgttactactggtgccggcacaccaaaaccatatatgtctgatttaaaagctgctggaattaaggtaatgccggttattcctaatgttaagattgccaagaaaatggaagaaatgggtgctgatgcagttatcgttgaaggtatggaagccggcggtcacattggtgggactacttcaatggtattatggccacaaattgctgacgcaattaatattccattaatcgctgctggcggtatcggtgacggtcgtggtgttgttgaagcatttgttgctggtgctgaaggtgtacaatgtggtacaatcttttcaattgctaaagaaagcccagtaggtgataactggcgtaaagctgtcatcgatgctactgatactggtactgctgttgttggctctactatcaagggtggtgctactcgtggtattgctaatgaggaagctggcaagttgtttgaacttgaaaagacaggcgtatcaagagatgaatttaattcagcattgaacaagggactatacgttggtgtaagagaagatgaccctgataagagtttctttatggctggtgaagttgctggtctaattaaagaatctaagcctgctgcagaaattgttaaagatttaatggatgatgctcaaaaagtattgaataaaaacatcgaaatcatgtaatttaaagccattttatggctgtggaattaatacataaaatatttataatcaagcattaaataaaggcgaatgtaatttcgccttttttattattattataagttataaccaatagttatgataatgctaaaaattaatgatttcacaatgctagatgtaagcggtaccttataagtgtcaaggaattaaatgattccaaaattctactaatttgaaacatactctcatacatattattaaactcatctggtttccaattcagtagaaacgtagttagttagatttaaacataggaggataaatctatgtctgttaaagttattgacagtaaaactgcagcagaattggtcccagataacgctagtgtagctcttgatggctgccttggcactgatgtcgctgaagaaattcttgaaatgatgaaaaatagataccaagaaactggacatccaaaggatttggatgtttggtatggatgtggtatcggtgataacaaaggctcagccgttgaaaactttgctgaaaaaggaatgctccgtcgagtagttggtgggcttgggtcattagcgccaaagcttgcaccaatggttgcggataatgattttgaagcctttaatttcccacaaggtacaatttcacaattgtttagagatgcagctgctcaccgtccagttctagtaactcatactggattaggaactttcgttgacccagaaaatgatggtggtcgtttaaatgaagctgcaaagaattctactttggtaaatagaattaagattcatggaaaagattaattagcttatgaaacaccaaagccagatgtatcaattttccgtggtacttatgctgatgaaaacggcaatatcacatttgatgatgagcctttaaccatggctgttactgctgttgctatggcagctcacaacaatggtggtaaggtaattgttcaagttaagcgtgttgttaaggctggtagtcttgatccaaaggccgtcagagttcctggcgttttagttgattatgtagttccgactgataatcctgaaatgactaaacagactaccgattacatttacaatccagatattattaagtctaatattgtaaaagacgttaagcaaatggacttacctcttgataaaaagaaggttattgctagaagagctgcattcttattcaatcctgataccgaccattgtgtaaacttcggtattggtcaatatccaatgtattgcgcaatggttatgaaagaggaaggattatctgacaatatcgtaactactgttgaagcaggtacattcggtggcacttcattaggtggtggtagttttggtacagctattgctcctcaagctactattgatgaaccttacatgttcgatttctacaacggtggtggacttgacgcaacttacttaggtttagctgaagctgaccaatatggtaacttaaatgtttcaaaatttggtcctaagattgccggtactggtggtttcgttgatattactcaatatacacctaagattgtcttcactggtacgttcactgcagctggacttaaggaagaaatcaaggacggtaagttaaacattatccaagaaggtaaagtaaagaaatttgtaaagcatgttcaacaaattaccttctcaggtaaagtcgcatatgacagtaatcaagaagtttggtatgtaactgaaagagccgtatttaagctagttaaaggcggtattgaattactggaaattgcgccaggcattgatttacaaaaagatattcttgatcaaatggaatttaagccaattattagtgacaatttgcaggagatggatccgagaatttttcaagagccagtcatgaatatcaaaaacgataagaaatagttaagtgttttaattcatagggggatgcaaagttggatattaaccaaatccgttatttgctcacaatagcagataatgactttaacttaactcgtagtgctgaagtcctccatatttctcaacccgctattagtaaagcgattaaagatatggaatttaagcaacaagtaaaaatctttaatcggcgaaagggtaaaatcgttggattgacacgttacggtataactttagttaaggaatctaaaaaagtgtatgaacaatatattgaaatggtttcgaaactaaatgaattatcagaaaatagtaacggaactgttagattaggtattgcaccagttattatatcgaccgtgttcaatgatgcgttaatagcctttattaaccaaaatccaggcattcaactaaaaattatcgagcgtggagcttatgaattacaaaggatgttgattttaggtgatattgatctagctgtgattgtttctccagcgactgttgaaggtatttatgaggatttaatatacgaaaatacagttagggtttggtttaataaagaacatcgttttaatgattttactggtccgattccattctctgaaatagaaaaagaaaagattgttactctgacagatgattttatggttacctttcaattgaacaaaagatttaaaggtgataggctgaaacctaattattttcttcaaacacaatcatgggatttgattttaaatttagttcaacgtgataagaatttaattggtattgtggctgctccaataggaaagaattatagtgatcatgcaataaagaatgctgaaattacacctgaatttccttggaagatatcgatttgtcatactatgaattccactgaagatccaacagtagaatacgctaaaaattggtttttgaaatacttttctaaatataaaaagatatcaattgattaaaaattaaggaagaatcattatgaaagctatatttccaggtagctttgatccaataactaatggtcacttagatatcattagtcgtgcttcaaaattatttgataagttagtcgttgttgtttcaaataatacctccaaaaatggtatgttttctcctcaacaaagatatcaatttgttaaagacgctgtgtctgtttatcctaatgtttccgtgagccttgttcaaagtgatttaactgttaatttggttcatgaattaaatgctgatgttattgttcgtgatgtgagaaataatgaggactttgtttatgaacaacaaatagcattaatgactaagaaaatggaccccaatatagaaactttgattctattttcaaaccctgaatgttcatacatatcttctagtattgtaagagaaattatgctatttggaggcgatatttcagatgctgttcctgcttgtgtaaatcgtgctctaataagaatgaaaaatcaacatatggcaaggagcgtatcattatgaagactagaaaagaaattaccaatttaacgatcacagctgtatttattgcattgctttttatccagacatttgttccgaatgttgggtatgtaagaattcttcctagtcttcctgcaattactactattccattaaccattgctgtttatgggactttaatgggaccgaaatggggattgggttttggattagtttggggaattactcgtttagttgtggcctatacacaaccaggggatatggtcagcttgcttttgttccaaaatccagtaatctctcttgttcctagtgttctagcaggattctttcctggattaattagtcagaagtttaaagatagggatgcacatattcaaaagatagggtatatgctcagtggagcagttgcttcgctgacgaacactattcttgtaattttacttaccgatttaatgtttatgtctaattcaagcaccttaacaagttacttagggcatttttgtcagtcaactccattgttggtaattctagtcactgctctaggtttcaacggcttggtagaagcgatatttaatgcaattcttgtccctataattgttacacctcttaatttggtacttaaaagagcgtaaatgatgaataattttattactgttgaccgtaatcactggactaaattaaactctaagattgagcttccttcttatgaactattaaaaagttttattgatcaaaataagttacaggttacagtcaatgaactttaagaagtatatatcctattagttcaatatatattgatttgcgttcaaaataagaaaatgttctctaaattaaagacaaattacattaagagtgctgatttaaaccagccatttatcctgggaattactggatcagttgctgcaggaaagtcaacgactgctaaagtaatagagactcttattagtcaattttactctgatttagatgttcaatcattgacgactgatggctttatttatcccaacaaagtactggagcaaaagaatttaatgtcacgcaaaggctttcctgaaagttacaatgtatcactattaaatgattttctttctcaagtaagtgatggggtagaggaagtttcctatcctgtatactcacatgagctttcagacatagttcctggtaaatatcgtagcattaccaatccagatattttgattttagaaggaatcgatattttgcaaattcctgaaaatgaagagaagattatcagtgattatatagatctatccatctatattgatgccagtgaaaacttattagaggaatggttcttaactcgctttaaatgtttgctagatattaataaagataatcctaataatttcttttatcattgggctcatattcctttagatgaatcaattgattatgcaaaaaaggtttggcggacagttaatttagttaatctacgtgactatattgtaccaaccaaggaaagggctaatatcattctttataaagatgtaggtcacagagtaacatcaataaaaattcgaaaatattagaagtatctctttctaagcagttcatgagaaatcatggactgcttttggttgtgtgtcgggcatggcatttgtctagtctagtgaaagtctagatcacgggtagttgtcgccaagtgtagcgaaccacaagccgttagcggtgacgctatgggtgaaggaagtggctagcgagttttccgagcctacgtacagaaacctggtcaggccaaatggtggatgagactgcagcacaagttaaagtccaaaggacaaccgtaaaaccaagacggtaaaccagggggcagtggaaaattaaagatgaatgtcttaccccgagagatctcgtggacaggtgaaaccgagtaagctttaatatcagcgatcgtaagcctggtcgaaaaaggttaatcgcgagaagtcagctgaggtcgtagtagtgctgaaggttttgtaatgaaactggagcgaagggcctaatgtttgtaagagcatatctcgctataagcaatgttcagacagtccggataagaggatagcctagcacaaagagaacgtaactctttgatggtgaaagcaattgggacaattctgaataaatttacaagtagaaatggagatatcacgagatggaactaattgaacagattttaagtcaaaataatctcaaggaagcaatcaggagagtcaaaatcaataagggagcgcctggtgtagacaggagaacagttgatgagcttgatagctattttaaaaagcatcaagtagaaataaaggacgccatcatgaagatgaagtatcgtccgcaagctgttcgcagagtctacattcctaaagctaatggtaagaaacgtcctttaggaatacccacggttgttgaccgagtaatccagcaggctattgcccaagtattaatgaagatctatgatcctcattttagtgagcatagctatggctttagacctggacgcagtgctcatgacgctattgaacaagtcttggaatatttaaacgaaggctatcaatgggttgttgacctggatattgagaaatactttgacacggtaaatcatgataaattaatttcaataattagagagcaagtaaatgacaaaaccaccctccatttaattcgagcctttcttaaagctggagtaatggaagatggttgggttaagcctaataaactaggtgtaccacaaggcggccctctttcaccaattctatccaatatctatttagataaaatggataaagaattggaacaaagaggcctgcgctttgtccgctatgccgatgactgcaatatctttgtcaaaagcggtaaatcagccaaacgtgtgatgaattcaatttcatcatggctagaaagaaagctattcctaaaggtcaacgcaaccaaaaccaaagttgtacgaccaaccaagagcaactttcttggctttaccttctggaaaagtggcgaatactggcaagcaaagccaggagatgaccgcaaaatcaagctttatgacaagatgagagaacttctctgtcgcagaaaagcagctgctcagcctctatcactagtctttactaagataaatcaagtagttagaggctgggtcaattactttagagttggcgacatgaaatattttctaattaagttcagtcaatggctgcgtcataaagtacgggtggtaatcattaaacaatggaaactaccaaaacgaatatacattaacttaatgcggattaacaaggcactaaagtgcaattttagtgatgaagatattcataaagtagctaatacgcgcttaggttggtataaaagaagtacgggttatgtcattaactttctgcttagcccaaaagtattgggcataagcaaagcggatcgcccaggcttggtcgatccgctagaatattatttatctcgtaaataatcacaaacgtagcgccggatacggaaccgtacgtccggtgcaatgagaggggcgagttataaaactccctctactctattaatgtccgtgatctcatcggggtgcaaaacaacatatacgaactagatccacgatagagtataattaggttgaaaacttaaggcagaatagttgtagagtggagggaaaaatgacaaaatatgtggtaaatagtgaattaagcgatactgaatggcaaattgaaaattcaactgccagatatcgctttatagctgacaatggtgataaaactggaggccctgatcctgttgaatatttaactggggcattaaattcttgtatgtctatttcagctggattgcttattaaggcgcaccatctggacgttcaaaattttaagattaatgcggaagcgaataccgagagattatcacacggaatgccagatgttgatacgataactatcaaaatatcatttgatagtcctatgtctcatgaagatcaagataaatttgttaaagatattttaagagtatctactgtctatcaaacgttgaaaaaagcgatcaagattagtattgagtggaattagcctaagttaaaatgactagtacgaaagaagcactgaagctaaagacaaataattctaaatacaatgcagtagtaaggccatactgcaatatcaattaataaagcaaccagtgtagataaaagatctatactggttgcttttgtttgatttaagttagtgacagtatcattaagttaagacattgacaaatttgacgcttttggaaccgaatcattttgattcggttctttttctttttacaataaaataaagagtgagcagaagtctatatctgcttactcttttgtctcttatcaatttttttataaaaagagcgtagttctcatgaaatcccttcacacaaacattttaaaactgatgaatcagattatcgataaaattcaaaattcattattgacaaaacaataaaataagattagcataatattaaaattatttaagaaaggagctacatatcatgttagaatcacaaaattcagcaacagtagaattacgacgccgccaccaaaatgatggtttattttgtgatcctaaattatggtgtgcggcgaattttgtttaaaaataattaattaagttgattactaagcaaggttcacattcctaattgggatgtggacctttttttgttacagaaaagagaaaaaactatgaagtcaattaaattatttggttcaactggtctacttattggtgctgctttaactttagtagcatgtggtcaaagcaatacaaatgcagcaaaaagtgcaaagaaatttcctgaacaaactgtacaaaaaactgcacagaaaggtggcactttaaactacgcaatcgaaacagatacgccttttaaaggtatttttgatagtcaattatcagttgatcaagttgattctgatgtcatgcaatttggtaatgaggggttattcgatactgataattcatatcaaatacgcgtggtgctagttaaatcgttttagttaataaaaaagtccaatcggattagactcaagttgtaagtaaattaaatagaaaagagtctgatctaattgaactacctcaagcttaatcgtttctctcaccatttacaagttagttttagtcgtttaaatgtaatttgtcgttcactatataatctttatgcgcctgataagcttacgcatcgaaaaaacattgatcaaacaaagctttccgacagctccatcttagcgatgctcatttggcaaactgaaattggaattgaatcccaaagaagattctgtaaattttttgttggcttatctcattctcgctttaatcgtcgagccaagatgcttttgcctttaattcgctgcatccgtcaagcttggaatcaagaggtaaaggttgctggagaatttttaattattgacagttttcctgttccagtttgtcagcctgttcgtaattatcgtgttaagatcttccgtgacatagccgatattggctataaagcaaccaagaaagtctattattatggtttcaaggtgcacgcgctagtaagcgatgaaggctatttgcttgactacgcagtcactaaagcatcagtgcatgatgccaaagaaacgacagaattgatgattaatgctcatccaattaaccattatcttttaggcgatgaaggctacttaggaaaagacttagctgccgagttaaaaggtatgggctatgtcctttggacaccatatcgaaaaaacatgaaaggtgctaaaaaacataataatcatcaactgatggcaattagaagaacaattgaaagcgacttttctttgctcagttactataacgctgaaaataaccgagcaaggagcttagctggctttcagcagcggctagaaatagccattttagcttataatatggcatattgcctagaacgatttaactagcaccacgcgtatatcaaattaataataaaggacctgctacttttaaacttgataaaaatgcaaagacaattactattacggtaaaaaaaggtgttaaatggtcggatggtaagcaagttgtagctaaagacttagaatatccatatgaaatgactgccaacaaagcaactaatagtttacggtattcagattctttagaaaatattgttggtatgaaagcttatcacaatggaaaagcaaaaactatttctggtattcaatttcctaatggtgaaaatggcagaaccattgtcattcattttctttcaatgaagcctggtatgttgcaatcaggtaatgattactttattgaaactgctgctccgtatcattatctaaagaatattcctttcagtaaattggtttcatcagatcaaattagaaaaaatcctatcttttttggcccttataaagttagcaaggtagttagaggacaatctgtaacttaggttccaaataaatattactggagaggtacaccaaaattaagcaaaattgttgctcaggtagtttctactaattccgcatcccaagctattaagagtcataagtttgatatagccgatgtggtaaattcacaatggcaagcagttaaagatgcgaaagatacaaaattcattgctaaaattcctcttgcttacagctatctcggcttcaaagtgggtaaatggcaagatggtaagaatgttatgaatcctaattctaagattaatagcaaatctttacggcaagcaattgcttatgcaatgaatattaatcaagttgaaaagagatacacgcaaggtttgacttttagagtgccaaccttaattcctgaacaatttggtgattactttgataaaaattctaaaggctatccttacaacttaaagaaagcaagtgaattgttagataaggcgggatataagaagaaaggcaaatggagagttcaacctaacggaaaaccattgagcattcatttagcagctatgagtgggtccgccgttcaagaaccaattattcaaaactacatccaacaatggagaaagattggacttcatgtgagtttaactggaaacagattaatggaattcaattctttctatgataagttagaccaagacgataaaaatatagacatgtttattgcttcctggtcattgtctagtgaaccatcacctagagaaatctatagtgaaactagtgcaatgaatgactcaagatttgtgacaaaagagaacaacaaattactcaatgaaattgattcgtctaaggcgtttaatcatgcatatcgggttaaggcctttcataagtggcagcaatatatgaatgatgaagcttatattgtgccaatgactaattcttactccattaaggctgtgaatagcaagctggttaactattcacttaaaccggctgaatcaaattcgatttggtataaggtgggatttgctaaataatctttcttaagaaaaattcccttccagatgattgaaaacgatcaagattttcttttttgagaatcttggtagttttttatgatttgtaattttataaatgattaggcagtttgaagtctatatgtgtatatttaaattgtataaaatctccttaaatgctgatataacaaggattatttaatatagctttttagcctaatgaagataactatggttatatttatataatatattatatattttagagcagaagtaaaaaaattcgaaattgtttattaattatctgaaaattgaaagcaccaaaatcaagctcaagtcctgtcactattgagctttcttagacgtaattagtttttatatgatctgtttcagtgcaatttgtatgaatcgtggcagttggttaataaagtcattgattacttcatctatcttttcaaaactattctgtttaagctcttttaattctgaaattaagtagaccaatgcatctacgaatctaatatcaggtaaggattcgttcattagatagaataaatctccgattgtcttatcatctgtattttgtctttcctgccaggtcaatagatcataagttattgctgtaactgcgatatagccacattggccatcatagctttgaacttgagatttatctaaagcaagatattgcttagacgtcttaaaatatgtttcaatttgccatctacgaccataaagttggatgatttcttcagggctaagctttgtctgagtagtagctaaaaccaaatacttgttcttgtttccacggttggagacaaagacgagctttaataaaaagctatgtccatgatattgagcctcaactatgcttgaataaagataatgtttctttttacggatgtttgaagcagccaaacgatcatacaagtctttaacgctatagcggcaatggcgataaatgtaataaatctttgaactcttcttgatcatgccaagtccatctaaaccgatcttctttaaaatccaaaacattcttggagaagaaaaccaagaatcgaataagacgtatttagcttctactcctaatcgtaaggcttgtctaatcaactctacagttacatcattcatctttctctgagcttgatttctccttttaccagaaattgaacgttcatcagcagtaatgggagcagctccaatcatatttttcttggttttggttgacatcaaggcaaagttaaccggcaagaaggtattgccatcgctccagcctaaagttaaaccacgatatccgttcaaatactcatgcttgtcatggtcatagactttagctagcaattcggtctttttagaaaaagaccgagccatcagcgtatcgtcaacgataaaagcaagtcggcgtcttttatcgataaatggttttaagcagccaatgagccgggctgcaatcaagcataatagtttttgcagttgattcttccatcgttaagtacattgcgagcagttctaacggaaaaacgtttgtcatccttagctctgaataaagaaagccgagcaaaatgtactgacatcagccaagagataatcatggttaatgaaacggtggatttacgcttaaaattgacttgtttagttaacttagctagaccaattagattaataaatgaagaaattaaggatttagtatcgttttctgtgtcgatttgttctatactgttcattgcgcaggatctcctttactttttaggtcgacacttaaagtataacgcagagagatcctgcgtttttatttttgataagaaaaagccaagaggcgcggggaaagagcgttaatcttagctttcaagtttcagttaattatatagaaatggttatttaatttgcttaacctaatgctatcgcatttgaaagagctttcaatatcttttaagatgttatctaggtttgttattaaatatttacgcatatagacttctttatttaacctgctaccctattaagtgaagagacttataacgaagtttaagaaaccgactacttcttaaataaatgagtttaaatttaaagcttgaaaataataaggacttaaaaatttcgagctttcataaataataaataggggattaggaaaatgaaaaagagcattaaacttttatcaacaattagcattgccgttgctttagcaggtggtgcaattactgcagttaacaatcaagaaacttcaaatgttgatgctgcatcaataacattaccttctggttacaccaaggatgccgttatcaaatggaaccaaactggtaaggccagcaaggctttggtaaatgcctcaattaagggtatgaaagaaaataatgatagtgatgctggttcagacaacaccttggttaatgtaactaagttaactgatagtcaaaaagttgaattaagcaactacactttggaattgattaattctgatcgtaatcaacttggcaagcaatcttggacttacaagcgcggtgcattaaattttgctgaccgtgtagctaatcaatattactcaaacaacaagtcttgctgggatcctgatcactatgttactggtattgaacgtgcagccaaggcttcaggtcttaactcacgtgttggtcaagtttacgaagatgaagcaggtttgccaatttcttcagaatttaacaccaactaccgtacaatgtcggctttgaagagccaaatctacttcaacgttaagcagatgctcttcggtggctttgctggctcaagtagccaaatgggcgatgcttctaagtatactgaatgggaacacgctggcgacttgcttggctgccgcactaagcgctacatccaaaactacaagaaattcaataattaatctgacgttgtagtttgaaactaaaaaagtttcctaatccaagagttcaaacggtttagtcacctgtctgggctctttttaatttgcttaagaatattttgaataatatgattaaatttctattatgtgagattttttcaaaatgtggttgactgtaaacaacaaatagtaaagaatacagttaatgaaaagcgaggaagaacttcataagttagtggaaaaggttattgatgattttgctgcttgggatgaagatgagcgctataaggagccagaaaaagaactacgtcagctgttggaagatagtaaggtcttgggctttataatgtacactagattgagtgatattctgggttggcatcatcgtatgttgactgaagccaaggaagagagaaccttaacagctaaggaggaagtattactgaatgacatggatgcagttcatgatttgatggaacgaaccatggatgaagagaatggtaggttgtagaaagcattaaaattacagaaaaataaaaccacattgctcaaaaattgaagtgagtaatgtggttttttacgttgtaattattgtagtagccaatcaataagattgattttttgaatcccgtcgtagttggctgtgggattgatagtatcaagggttagtaaaagtttggaatgaactccaaacaaatgacatttattgctgctttttggagtcaactccaaaaagctgactttatcgttttgatggaattgaataggggcaagggagatattgtaaaagcgagtgtcgagtaaatagtgaactgagacctaaaagttagacacttttaggtctttttctacgtaaagtcaagcataataagaagtttgacttcattttttgtttaaatttcaacttaaacatcttttagtgtcgatttatttttttagttagacacgacaaataagcccagatccatatctgatttttgggcttagcgttataatgtacttgatcaattaattacgactaaagtctttttgattatgtgtggctacgttgtaatcatatggttgatcattgataatcagggcataaatggttctgattagtttatgaattgaagcaatagctatctttttgaaccctttggtttgagaggatagctttttgctttcataataatctgctatatgacacggatttgtcttagctgcattatcaatttgtccaatagctcgataaagcaacttacgtgcgactgcattgccatgtttagtaatacttaaattagagtccatttctcctgactgatatctgcctggatcaattccgataaaagcattgattttattaggattactaaatctgcgtaaatctcctaactctgctaaaactctgacagcagtggtctgtgcaaagcctggaatgctttctaggttttctaaatcatgattaggcaaagacttcgctaacttaaccattcttgcgattaaattttctctttgatcacttaaattaagcaatctgtgtgcataatactgcacttgctcgacttctatgctagagcaagatacaactggataagcttgataagctaattcaattaatttatctgcagtccttagagcgtgtttaaaagcaatcccctttaagctcattaaccagttaataagctgttttttatcttctcttcttactaagtcacaatgaggatatcgcacaactatttgccagtaatttttacctttagcagaagaaaatagattttcaatttcaggaaaagtcgattgtagagcttggtaaagtcgatttttagccattactaagtcagctgttaactggtcatagaagcggctcaaagcattaagctgcttataagtttgagattgaagttgattaattggatgatgatatagtctttgaattaaggctaaatgataagcatcagttttatcagtcttattatgacgtagtcccatatccatttcttttttagctttaagaggattaagaattacataatcatagccatagtcttccagaaaagattgcagtgtacgtgaataaacaccggtagcttcaaaaataatttgcggatgtttagaaaaagcggttaattcatgaagcaattgaataaaaccaggacgattattagtaatggttagttcatttttgctttcaccaattagttcacaaacagtagaagtagacttgcttacatcaattccaaaagtaacttgcataataaaaacctccaaaacttagtagtaaaacgtatttacttaagaaatcagatctaattttctaaactcgacatctagtgtccacattcttcgaagagactattgaaaacttaagtaaaactgccagtttattatgcgacatcaagtgtctaaagacctcagggcatatcgttttactactactttaattctacaaaagaataaaaatagtgaatcaattatcccgtcggataactaattcactatttagcttagaatgtttactatgtctaaatttaataaagaacaaaaaatagaaatttatcataaatggaaagatgaaaatatctcaatcagtcaattggctaaagcgtacagaatgaatctagctaatttagactatatgcttagattaattgatatgcatggaatagaaattttaactactaaaaaccaaagctattccaaagagtttaagcagcgaactattgaacaagcaatctttggcaataaaccatacttacagctgcctttggaactggggtttaaaagtattggcatgcttaacaattggattagagaatataagaaaaacgggtataatgtcattatcaaacagaaaggacgccctgcccgtgaccaaagaaaagcagaaatctcgcaaggaactggagaaagagatccagcagctgaaagaagaaaacttgcgattgcgtattgtgaacgaatacgtaaaaaaactaagtgccttggatcaagaagatcagaagaaatagctagggtgattacggatctaaggcaagaattcaaagttagtttaaattatgtattagctgcgattgcagagcaccctgagctacctataattgccagaagctcatactacaagattatcaaacgacagcccgtcaagcctaaacggtcaaagcttattgctagaatccatgagatttttaatcatcatcaaggccgctatggatatcgcagagtagctttgcagttaatcagagagggctggaaagttacggagaaaaccgttcgctattggatgcataaattaggtcttaaaggcatcaggcgcaataagcgcaaatattcaagctataaaggtactattggcaaaatagctccaaatttaattcatcgtgatttcttcgcagccctgcctaacacaaaatggtatactgatatcactgaatttcatcttaataatgaaaagctttatttatcgcctattctagacggctgcggtggcgatatagtttcttatactatctccaaacatccagatatggatttagtaatgacaatgcttgacaaggcttttgccaaagaaacagctcttaataactgcatttttgatactgatcagggctgtcagtatcaaagccctcgttatcagcgagctttaaaactccatggtattactcaaagcatgtccagaaagagcaactccatggatgatgggctaatggagaacttctttggcctgctcaaaactgaaatgttctatgatcaagaatacaagtatcataatcttcaagaattaactcaagcaatcgaggaatatatcgaatactataacaacgaaaggataaagagcagattaaaaggcttaaccccgaaagagtatcgaagtcaagcctctattaatccaatattttaattgtctactttttacgtctcagtacatttttacattaattactattatttttcttcttaattagttaatttaaaaagttctggtcaaaacctgacacctttgacacttttcctctcaacaccttgatactactagctttatccatcatatctccattgacaccaaaacaattcaaaagctacccaatgcttgatataacaataatctgctagtgtcaacttaaccaacaccagaccgacaccatttgagttaataactgacacttttcaaatttcaagattcggtgtcaacaacggtgtcgcacatcgactaaaatgtgtcagctaaaccgacaccaaattttaacttggctatgtagattctcaaccattcgcactatattaaatgcaagcctgttcaaaaacttttagctttttgaatgaacgtgctgggcctacaacatcaagcttaaatgatgttcagaaacttatggtcaaaaaggatggattgaaatgacggaatatggctatgctagggtgtctacaaagggacaagaactagcagatcaaattaatcaattgcaaactgctgggatcagtgaggattgcattttctccgaaaaatttactggaactacaactgaccgaccacaatttgctaaactaactcaattggcgaaaccgggtgatgtgattacggttaccaagctggatcggttagctagaaatacccgggaagcattaaatgttattgacccactaatgaatcaaggagtgaagatcaatgtacttaacattggcatgttggaaaactcaactgtgggtaaattagttaaaacaattctcttagcagtggcggaaatggaacgggatatgattgtggaccgcacccaataagggaaacgttatgctaagttacaccggtctgattatcatgaaggacgaccccaaagagccattaccccgcactaccaagccgcttatgagtacttgcttactcattcctacaaacagactgcgagtgcttttgatatttcgatttcaactttgcaacggatccgaaagcaggtggagcaaaataatatagcttagttttaaaaaagtatatattattttgcgctggaggatttgaaaaatggtaaaatgttataccccatttatttactggattgatactaccggtctagactggcaaagcgatgaaatcattcacctaaccataacggatttatttggtaacattgtgttctcacatctgtttaaaccagtgaaaattgaaagttgggacccaactcagcagggtttccacacaaaagcacttgccccccccacatattcaatatataataaattacgcgtggtgctagttaagtcgttttagttaataaaaaagtccaatcggattagactcaagttgtaacttaaattaaatagaaaagagtctgatctaattgaactatctcaagcttaatcgtttttctcaccatttacaagttagctttgctcggctaaatgtaatttgtcgttctttgtacaagctttgtgctcctgatgagctgaaataccgtaaaaatattgatcaggttaagctcttagacagttctattttagcaatgcttatttggcaaactgaaattggtatcgaatctcaaagaagattttgtaaattctttgtcggtttgtctcattctcgctttaatcgtcgggcacgaatgcttttgcctttaatgcgctgtatccgtcaagattggaatcaagaagtaaaaacagctggagaattcttaattattgacagcttcccagttccagtttgtcagcccatccgcaactatcgcgtcaagatctttcgtggcatatctgatatcggatataaagccactaagaaaatctattattacggcttcaaggttcacgcgatagtaagtgatgacggctatgtgctttggacaccatatcgaagaaacatgaaaggcgctaaaaagcataacgatcatcaactgatggcaattagaagaacaattgagagcgacttttctttgcttagctactataacgctgaaaataactgggcaaggagcttagctggttttcagcagcggctagaaatagccattttggcttataatatagcatattgcctagaacgatttaactagcaccacgcgtaataaattgcgtcttagaaagaggatataaaatatggacaaattacataagcaacaagtagcaaaacgacaacgatttgccattaagaaattaacagttggaacggcatctgtccttgttggcttaaccttcattattagtggtaatgccaaggcagatacgacagttgctgctcaaaatacattcacgactcaagtgactgatccacaagttagtgcccattcaagcaatattcggattagcgacgaatcaaatacggttgttcatcaaacttcatcaacattagttccaaataaaacaacaacgccagcgcaacaaatgccgataatccataaaacacagcaaaacaaccactgcccagtaagtacaacaaacacagcaaaacaaccactgcccagtaagtacaacattactatgaattttcgcgatgtcaccctacataagccaattcaagtgattagtaatggtcattatgtattcaaacaacctttcaagcagaccacaattcgaccaggggatagtgtggatcaagaatttactgtggccggttataaattaatgaattcagaagttttgaataagtatttctattttgataaacaaggtaatgcctgccttaagaaaggtattactacgcaagacattaacattaatttagattacgcatcattgtcaccaatcaaagtagagtatgttgatgtagataacgggcatattttagcatcaatcgttctagatagtttctggatggcccctgaatctccacaacaccgtgctggtgataagaaagcaccggatgcatcacgctatgaagccgcagccattaatattcctggatataaattagtttctgaacctgttttaaagggtaaaatcactggtcaaactcgaaattcgttagctgatcctaactatgtttatttaactttcaagtataagaaggttataaaaaataattctgatagtaataggactgaattgttacttgttccagaagaaacaaatctaccgtacaaactctttacgattgctggtagctatggcgaaaggattgacctaaacaatggtaattatgagaaaaaaatgagtgaggagattagccattacgaaaaacaaggttactcctatataggaagtacagggacatatcttaattctgattatttcaattggtacgctaaggggatacatgtttacttgctaccaaacaaaccagtaactgtgaggtacattgatgagcaaggaaatgtgcttaggaataatgatacgcttgcgttcaacctagataatcctaaccaaaaaaataatggggttaatccgcaaaaaggctggtatgcaaagggtccatggcaagtccaacctaagaaaattaaaggttatcgtcttgttcgtactcttggagcgacgagtggccagtatactgtataccagtacatcacaacttttgtttacactaaggacacagatccaactgatcccaaaacgccagagacaacaacaacaacaacaactgatccaaagacaccaagcgataagcttccggacaatcctggcaagtctggtcagacagttccagttaatattcacattcctgatggttatcaattagttcctggtgaaagtgttccaacattttacaccttcaaggatggtaaccctaatcaaatcattagttgttggttgatcccaactaatggcggtcaaccaacaactaatgatcatcaaggacaaggaacaccagctactaatacgcctacaaacactactcctaatggaaatgctgttactggcaaactagaaggtaatgttcctaacatgcaaactgggaagacgattacgtttcaaccaacgacagctaaggataaccaactaccacaaactggtaatgacaatagcttaacaaccgttgccgggattattgtaagcctgttaaccagttgcttagctgttcttggcattaataaacatcaaggctaatatgattacctaccaaccattccgaagctaatcaagacgcgatgctttaattagcttcggaattttgaatgatatatcattataataggatggaataaactttatataaatataagtaatggggattgatttctaatcttttaagaatactgtttatggttgattttttatacaatgtttccaactgagagtaaatataaaaagggagatactatgttatcagcaaagaattattacggccgtctggtaaagttaaaaccaaaacaagatcatttttcacttcgtaagttatctattggtcttatttctgttaccataggtattaccttatacttgggagtggacaactcctatgttatggctgatacgaatttgagggataataacaatcaacaattagccggatcgggtaatggcaccaatataataaatgataaagttaaaattccaaccggtgcttttcagtctaaacaaatgcaaactgaaaattgcaaagtaaataatcagatgttggataaaactgaagtaacaaattctactaaaaattcttctacactaaatgtggaaaattccaagactgctgatttgtcgagatttgattactctttatatacaaaaaaagtaaagagttttgaatttagaaattcagataataacgatgtaattagaacagtaatattaaacaaacctaccggtgttgaaactgtaactatgactttgaatgttagctgcttaaaagggagaaagcatcagcatcgatcgcacacatctactagatcgagtatttataattataaacctcaagttattgctgaagtaaatacatccaataatccattgccaaaaatatcaattttggagaaaaacgttttaccaaaaactttttttcaagtagataagaatacatttcttactcaacaggataaagagaactatgagaaatttatatcagttaataagaatgatattagcatagaattaccagctttttccattaatgatattgatattccaggctattcttatcatattaatgcaaaaaagactactcctggagcaggattaggtaaagaaaagttttacatctacactgaatcaccacaaacagttgttatcgactataccccgattacggttaaggttgaacataagatcatcacggtaacaccaaccgatccgaagacaccaagcgataagcttccagacaatcctggcaagaactatccaaagggtgttgataagaaagatctgaacaagactgttaagcggacgattactgttaataaaccagctggctcaactgttgatgctagtcaagagactactctaactcggacggctactgttgacgaggttacaggccaagttacgtatggcaaatggacaacctcaaagcttgataagtataatgcaccagaaattccaggttacactccaagtcaagcagaagtccctgcagttgatcaggtaacggttgattacacagatccaaaaattgaaattacctacacgccaaccgaacagactgggaagatcacatacgttgatccaaacggcaaagaagttggtactaccccattaacaggaaagacggatgaagagattccagttacaccaaacgttcctgcaggttggcagattgttcctgatccaaagattccaacaaagatcaccgctactccagacggcattcaaacagttacggttaaggttgaacataagatcatcacggtaacaccaaccgatccgaagacaccaagcgataagcttccagacaatcctggcaagaactatccaaagggtgttgataagaaagatctgaacaagactgttaagcggacgattactgttaataaaccagctggctcaactgttgatgctagtcaagagactactctaactcggacggctactgttgacgaggttacaggccaagttacgtatggcaaatggacaacctcaaagcttgataagtataatgcaccagaaattccaggttacactccaagtcaagcagaagtccctgcagttgatcaggtaacggttgattacacagatccaaaaattgaaattacctacacgccaaccgaacagactgggaagatcacatacgttgatccaaacggcaaagaagttggtactaccccattaacaggaaagacggatgaagagattccagttacaccaaacgttcctgcaggttggcagattgttcctgatccaaagattccaacaaagatcaccgctactccagacggcattcaaacagttacggttaaggttgaacataagatcatcacggtaacaccaaccgatccgaagacaccaagcgataagcttccagacaatcctggcaagaactatccaaagggtgttgataagaaagatctgaacaagactgttaagcggacgattactgttaataaaccagctggctcaactgttgatgctagtcaagagactactctaactcggacggctactgttgacgaggttacaggccaagttacgtatggcaaatggacaacctcaaagcttgataagtataatgcaccagaaattccaggttacactccaagtcaagcagaagtccctgcagttgatcaggtaacggttgattacacagatccaaaaattgaaattacctacacgccaaccgaacagactgggaagatcacatacgttgatccaaacggcaaagaagttggtactaccccattaacaggaaagacggatgaagagattccagttacaccaaacgttcctgcaggttggcagattgttcctgatccaaagattccaacaaagatcaccgctactccagacggcattcaaacagttacggttaaggttgaacataagatcatcacggtaacaccaaccgatccgaagacaccaagcgataagcttccagacaatcctggcaagaactatccaaagggtgttgataagaaagatctgaacaagactgttaagcggacgattactgttaataaaccagctggctcaactgttgatgctagtcaagagactactctaactcggacggctactgttgacgaggttacaggccaagttacgtatggcaaatggacaacctcaaagcttgataagtataatgcaccagaaattccaggttacactccaagtcaagcagaagtccctgcagttgatcaggtaacggttgattacacagatccaaaaattgaaattacctacacgccaaccgaacagactgggaagatcacatacgttgatccaaacggcaaagaagttggtactaccccattaacaggaaagacggatgaagagattccagttacaccaaacgttcctgcaggttggcagattgttcctgatccaaagattccaacaaagatcaccgctactccagacggcattcaaacagttacggttaaggttgaacataagatcatcacggtaacaccaaccgatccgaagacaccaagcgataagcttccagacaatcctggcaagaactatccaaagggtgttgataagaaagatctgaacaagactgttaagcggacgattactgttaataaaccagctggctcaactgttgatgctagtcaagagactactctaactcggacggctactgttgacgaggttacaggccaagttacgtatggcaaatggacaacctcaaagcttgataagtataatgcaccagaaattccaggttacactccaagtcaagcagaagtccctgcagttgatcaggtaacggttgattacacagatccaaaaattgaaattacctacacgccaaccgaacagactgggaagatcacatacgttgatccaaacggcaaagaagttggtactaccccattaacaggaaagacggatgaagagattccagttacaccaaacgttcctgcaggttggcagattgttcctgatccaaagattccaacaaagatcaccgctactccagacggcattcaaacagttacggttaaggttgaacataagatcatcacggtaacaccaaccgatccgaagacaccaagcgataagcttccagacaatcctggcaagaactatccaaagggtgttgataagaaagatctgaacaagactgttaagcggacgattactgttaataaaccagctggctcaactgttgatgctagtcaagagactactctaactcggacggctactgttgacgaggttacaggccaagttacgtatggcaaatggacaacctcaaagcttgataagtataatgcaccagaaattccaggttacactccaagtcaagcagaagtccctgcagttgatcaggtaacggttgattacacagatccaaaaattgaaattacctacacgccaaccgaacagactgggaagatcacatacgttgatccaaacggcaaagaagttggtactaccccattaacaggaaagacggatgaagagattccagttacaccaaacgttcctgcaggttggcagattgttcctgatccaaagattccaacaaagatcaccgctactccagacggcattcaaacagttacggttaaggttgaacataagatcatcacggtaacaccaaccgatccgaagacaccaagcgataagcttccagacaatcctggcaagaactatccaaagggtgttgataagaaagatctgaacaagactgttaagcggacgattacgtctcaaccaacgacagctaaggataaccaactaccacaaactggtaatgacaatagcttaacattaatgggcttaggtgcctccaccttattgggaatgtttggccttgctgctgtaaacaagaagcgtaagtaatcaaattagctctacaattttatccctttgtcagtactgatgaggtattttgatgaggttagtttaagtagcgaagctgcttgagctgaccttttcttttagcttagtttttaccatgagatttgagagctagtagacttcggatacgggaatgatcaaagttgcgaaaaccataagctgttattctagtggtcttaattttattattgtaagcagtcgttatcaatacgggttgaacaaagggactctacaattgtaagtactgatgaatttaacatcagtgcttattttggttttctacgaatagtcaaggatattaaaggaattccttggaatttagctggatagaaaagttaattaaataattaaaatggctcaaagttaaatttaaagtataacaaaacaagctcatgaactagatttattgaacctgtcaaatcttttgtgtaaatagttctttctcgtaaattgatttttgaattatttattcaaaataagattctaaggtatcctgaacctgaccaaagcctttatgaattcggttgaaatagcggtcattgtagctcattgcctggatgccaataaatgcatcaagcgactgttcagttggaaattctgccttaggcttagctttacgcttgatgacgttgttaaaggattcaatcatattggttgaataaattgaagctctgatttgtttgggataattgtagaagaccagcagatcgggctcaatttccttcaaacctttgatgacattgctataagctttattccatctggcatagaatttgtgcaagacagctgcagcttctttttggcttgtctgttgatgtatctgcttgaattcgttcatgatcttttcgcggtcatccacccggactttagcacagatattgcgcatgacatgaaccaggcagcgttgaaaatgagctttaggataagtcctggccaaggctgttttcatgccaacaacaccatcagaaagaaagagttcaacttgcttcaagcctctggacttcatgttttgaagcatctctgtccagacttcaatgttctcactaggagcaatgcagtagtcaatgacttccttatgtccattaggtttaatgccaatggcaatatagactgcttcacgctcaaacgtttctcggcgcaaaggaaggtatgtcgcatccaaatagacacagaaaaacttgtcgcttagcttgcgcttgtgataagcctcaaccttggggagcatctgcttggaaatatttgatacttgagctggactataatgactgccatacattttctcaatcaagtcagcgatttctctggtagttacgcctttggagtagagcttgataatcgtgctttccaaaacatcagagtgctgcttgtagtcaggcagcgtgtgctgatgaaactgaccgttgcggtctcgaggcacttgcacttcaattggtccaaactgggtatcaaccttgcggaaataagcaccatttctagaattgccagtattccagccatttctggcatagggatcatagcctagaaaggcagtcaactcagcttctagcaagttattaacatcctgttgtagctctttgcgcaataaatcatttattttgtctggattgaatagagcttgagcaaaatctttggtaaaatcattcatgaaggagttcttctttctgtatgtgtttttttgttcaaaccaatcatacgagaaaggaactcctttttctaatgtttaaagaaataaatttaaggaatcattcatccttacacaaactattttacagtctctccaaagagtttaagcagcgaactattgaacaagcaatctttggcaataaaccatacttacagctgcctttggaactggggtttaaaagtattggcatgcttaacaattggattagagaatataagaaaaacgggtataatgtcattatcaaacagaaaggacgccctgcccgtgaccaaagaaaagcagaaatctcgcaaggaactggagaaagagatccagcagctgaaagaagaaaacttgcgattgcgtattgtgaacgaatacgtaaaaaaactaagtgccttggaccaagaagatcagaagaaatagctagggtgattacggatctaaggcaagaattcaaagttagtttaaattatgtattagctgcgattgcagagcaccctgagctacctataattgccagaagctcatactacaagattatcaaacgacagcccgccaagcctaaacggtcaaagcttattgctagaatccatgagatttttaatcatcatcaaggccgctatggatatcgcagagtagctttgcagttaatcagagagggctggaaagttacggagaaaaccgttcgctattggatgcataaattaggtcttaaaggcatcaggcgcaataagcgcaaatattcaagctataaaggtactattggcaaaatagctccaaatttaattcatcgtgatttcttcgcagccctgcctaacacaaaatggtatactgatatcactgaatttcatcttaataatgaaaagctttacttatcgcctattctagacggctgaggtggcgatatagtttcttatactatatccaaacatccagatatggatttagtaatgacaatgcttgacaaggcttttgccaaagaaacagctcttaataactgcatttttcatactgatcagggctgtcagtatcaaagccctcgttatcagcgagctttaaaactccatggtattactcaaagcatgtccagaaagggcaactccatggatgatgggctaatggagaacttctttggcctgctcaaaactgaaatgttctatgatcaagaatacaagtatcataatcttcaagaattaactcaagcaatcgaggaatatatcgaatactataacaacgaaaggataaagagcagattaaaaggcttaaccccgaaagagtatcgaagtcaagcctctattaatccaatattttaattgtctactttttacgtctcagtacagtgctttcgaggcttttcttttatattattttttcttagaaatagagtcacggatatttaattgactatggcaagtgatcgtaagtggaatttgaatatcttccgtaattagatctttagccaaacgaacggcagtcttgcccatttcttcagtattcatatagacactggatagggtaggagttaagaagcgattgatatctacatcatcaaaactaacaacagagatatcgtcagggatgttaacacctgcatcactaaaggctttataaacacctaatgccataggatcactaccgacaacaacagcagtaggacgttgttgcagttttaagatctcttttccagcttcaaaagcagagttagttgaccaatcagtaataaaagaatggcagtactggtcaagattgtggagtttcatccaggacaagtaagtgagttcacgtagatcatttttttcacaagcaatcttaccgtcaagatcaagaaccaatgattttccaccgatgtaaacaatgttcttgtgtcccaggttatagagggtatcaagaatatgagaagtttcttccacaaaatcattacgaacgatattacaattatgaatattggtgttgacgtcgataaaaattatatggggattaatgctttgaatctgcttaattgctacaggtgtcatttcaccctcgattagcactgcgccaaatttagctaagtcagcccaatttttattatcatcttctattctaaaaggttgctcaatacgtaaatgccatttcttggcttcttcattaatgcctttatgcagattgagaaaatagggatcggtgatttcacgagatttgttataacgcatgattagtgcaatcgagagctggttatcagtttgcttgggaccaggatgtttttgagatttcgaataatgcaggcgtttggcggtttcgataacgcgggcacgactagcctcattgattctaaaagttggatcattgtttaaaattcgtgatacgctagctggcgataccccagcaatacgtgcaatgtctctaatacttgccataaagatgctccttgtttgtttactgtttacattatacaacttttagcaagaaactggtgtataccaaacttgaggataatagtttagtgtccataaagtaagtcatattgaatcaatgttacttactttatggacactaaatttacttattttactacactacatagtaaagtgtagtaaaataagtaaaaaagcaattgaaaaagaagaatatggaaataataaaatcttaataatttgttcgcttgtttttatatttgtaattcattaaacttatgttcgaaataatgaaaggagaaatatatttttcaattgtaggtaatataattccatattcgtatattgacagtacttatgaaacaaaaatcattgattagtcaactagcaaaaatacataacggtacaattactcatcgtgaattagcattaaatggagtatcaagttatagtatttcgaaagctgttcaggatggtacgttagaaaaaatacgtccgggaatttatttatttggtgatgataccgaggatatattttatagtttgcaacaaaaatataaaaaaggaatctattctttagaaacagcattatatttatgggggttaagtgatcaatatccttttagcttagatatgacttttcctaggggctacaataatccaactttggatattgaaataaatccacatattcaaactaaaagtttggctactcagggaataactcaaactgaatcattcaatggaaatgtgattaatctctatactcctgaaagaactctagctgaaatattgcgaccgattaatgctgtagatatcgaaataattatcaatgccttcaagatgtggaataaggaaaagaaaaaagacataaatacattaatgtcttttgcagaaaagtttagggtaactagaaaggtaaatagctacttagaggtgttgttgtgaaaaattatgttgatgagaagcagttcaaagcagatgtaagaaggtatgctagagagcataatataaaaggaaatgagattggtcgattatggcaagaaattatgttagatgatttgctagaaagaatttcagtatcaaaatatcgagataatttcattttaaaaggtggttttttgttgtcggctattgttggtatcgataaaagatccacggaagacattgatgctgagataaaaggattagatttgaccgaaaaacaaatagctaaagtatttgaagaaatctgtcaaataaaattagcgggggatctattaagcatttcgttgtcagaaactgaacagattcatgagcatgaagagtacaagggctatcgattacattttaatgcttcttttcggaagataagatatccattaaaagtagatgtttcaacaggggatgttattacacctagggagattgaatatagctataaattacatttagaagatcgacatattaatatttgggcatatactatggaaactatagtagcggaaaaattagaaacggtaattacgagaggaatagctaatacacgtatgaaagatctctatgatttattcatactgcagagagaacgaatcaatttagctactttaaagtcagcttttgctaatactacgaattaccgtgaatcaatcttttggacaggacaagatatggattataagtattgtctaagacaagtagatattattgctgaaaatagtaatatgcagaatctttggaatagatacgtgagaaaacatccttttgctaagggaatcacttttactcaagttattcaggcagttcaaacttggctaactaaattagagtttgaaaaataatttcaatcaaaaatgacgctaattgatcgaaccagcgtcatttttttagataatagatgtagaaaatagtttgaaaaacgattagtttttatagaaatctttattatactttacttgtcttcgtagccctttgggtgactcttgtgccagttccaagcagttgcgataacgtcatcaacactttcatgctttggcttccagcccaaaatagttcttgctttggttgaatcagcaaccaaagagtcagggtcaccgccacgacgtggacccattgtgtaaggaatatcaatccctgttacttttttagcagcgttcaaaatttcaaggttggagtaaccttgagcagtacccaagttaaagacatctgacttattagtctccatcatatgtttcagtgccaaaatatgagcatcaattaaatcttcaacttgaacgtagtcacgaacgttggtaccgtccttagtgtcatagtcatcaccaaagatagtaaacttaccatccccagaaattgcactcttcaaaatatttggaatcaagtgtgtttctggtgcgtgatcttcaccgattgtgccatcacttgcagcaccagcaacgttgaagtagcgaagagcagtgtacttaataccatcagctttatcagcccaagccatgatcttttccatcatcatcttggtttcaccatatgggttgattggatcaagtggggtgtcttcggtgattggcaatttcttaggaataccataagttgcagcacttgaagagaagactaagtatttaacaccagcgtcattcatagcttgtaataatgaaatcatgccagtaacgttattgtcatagtacttaagtggctttttaactgactctggaactaatgaatatgctgcaaagtgcattacagcatcaatcttttcatcacgtaaaattttgcttaccaaaaaagtatcttcaatatcgccttggtaaaacttagccttaggatctacagcctttctgtgaccagtatataaagcatctaagacaacaacatcattgccttctttaactaattcgcgtacagcgtgtgagccgatataacccgcaccaccgacaactaaaactttcatgttttgcgctcctttattttagttattatcttttattgaaatcgattacattataacacatattttagtaaataatttactgattttaaataaaatatttaaaatcaaagcaatttaaatgaaaattcgcaatcttggctaggattgatccgatatttgtcttcaacattgctgccccaactgtcaatgccgccaacaccgcggacagcaccagcaattaccaaaacagttctgcgggctaatggcagttcttcaatatgagttgcattttctagttcttctgctgtgtagggaaggcaactgaagttgaatggcttatcagtttgctcaacggtgaggtcaaaatcctcattagaatgatcagcattgttgagcgtagtatttctagtgattttgagttgatgcgtttgcatgtgcatcccattttcctgtggcactaggtatttggttactggcaatcccttaattttaaaagagccagcactggctccagccatccgatcaggataagtctcaccagataagccttcatattcaaagccactagctagagttggtatgataaagcgcattccaattactggaagcggtggtaaatcttttttaccaaaataacgcatcttaattataacatgaccattattgttaatttggtaagtaatttcaacttttgtttttggaatagttaaagtttcataaataaaagtaatttcgactttacttgcgtactcatgattagaaaattggttgttgagtggagcgattggcaaatctgcaaaatcatgttgatcaactttgagctgaatttcagtacagtggctaaacatatcggcgccgagccattgagctgcttttaagttgaaaccgttgccgcgatcgttatcagtagttgcacgccaaaaggttggggtaggaacgcgataaaaccattctttacccttaatttttaaagactctaagccacctttttcatagctgaaaatatattgcttatctggggtattaatgcctaaagtagcatccccatagattatatgtaaattatttgtgtaagccatagtagtatttaacctcctgcattgctggttttggtgtacgatcggcgaacattaagccatcgcctgaaaattcataatcagagtgtcggtcgtcaaagtcgccgccataccgtaatacttcttggccactcaccggatcgtgtactaatagcgcttggtcgatgaagtcccaaataaagccgcctaaatattgtgggtattggtcaagcaatttaatgtaggaacccatgccaccatcagaattacccatatcatgcatatattcgcattctaaaaatggcttttgaggcttatttttaagatattcttcaacatcttttggtggtaaatacatccagctttcaagatcagaaatcttgtcctttaattctggcgtatgaaccacgccttcatagtgggtcaggcgactatgatcgtgtgctttataaaatttattcatagccgcaatgttttctccggcatatgattcattgccaagagaccagaagagaatggcggtatggttttttaaagtttcataattgttgcgggcacggtcaattacagcttcacgccattcaggaatagaaccgggaacattatctgaaggttcaacttgtcccatcttttgccaagtaccatgtgattcgagattattttcagccatgacatagattccattttgatcgcagagatagtaccacggaatctgattaggataatggcaagttctaaccgcattgatgttattttctttaaaagcatgtatatcttgtttcatatcagttaaagtgatgctgcggccacgcttcatattccattcatgccgattgaccccattaataattagacgttgaccatttaataaaacaaccttgtcagaattaatttcgatttttctaaagccgaattggtaaggaattagttcaagtaaatcaccattttcagcgtgaacttcaataattagttggtacaaatatgggtcatggttatcccaaagatgcacatttttgaataattctttttcaatttttatggttaagctgattggtgcttttttctcaagtagagttttgccattaatatcttctacgaacaagtgaactgagccagtatttttgcctgtaaagtgcaattgagcattaaagattccatcttggtaattatttgtaacttctggttttaaatcgagatcggttaaatgcgtctcaggtaggccgagcaattcaactgaacgaaaaatgccagaaaaacggaacatatcctggtcttccaagaaagaggcagtgctatgtttgaaaacttcaactgctaaaatattgtttttgtttttaatgtaaggtgttagatcaaattctgaaggagtgaaactatcttcggcgtaaccaacaaaatgaccattgagccaaacatacattgctcgctcaactccttcaaaaacaatgtgaacatcacgacctcgcaaagtggaatttaagtcaaaatgcttaatgtaagagccaactgtgttatctgcacctttgctaaaagagtcggtagctttttggttgattgtgtaagcaggtcgacgataaatttttccttcccacggaaagagcgtattaatatattgattttgagcgtaattatttagctcaatttcacttgggactggaatgtgatcaaatgatgaagaatcgaaatctgttttaaagaaatcaacgggtcgtgtttgtggattagctgaaaacttaaaacaccagtcaccatttaaactttgaacaaaactactagtttgcttttgccattcgcgatagttcttgaaatagggatgatcgctgtgggcaggaacttgattaacgcggaaaacttcggggtcatcaagccagctaagatttgctttcatgaaaatacctgatttctataaaaaaattaaccttgaaaacgcttatattataacacatagataataaatttacttaataagtaaattatttactgaaaaatattttgaagattaatatttttgactcgaaaacgaatgacaaagtgcttatgatatttattggaattacgtaaatattttgtataataaagttaaaaattatttatttaagatagaaaagatataaatatgacaacaattaaagaaatagcacaagaatcagggtattcttcagctacggtttcgcgcttattaaataatgatcctaatttgtcaattacggctgatactaagaacaagattttagaaattgccaataaattgggctattggaaggatcatcaggaaaagaagatccgtccaacaattgcgttactataccgagtaaatcatgaagagcaactgcaagatgaatattttacttcattaaagcaagcgctgatttcaacagtagaagcagagtcgctgcagatgaagactttttatgatgcagatgatttgattaaacatgcatcactttttcagggctttatcggagttggcgcggcgccaattgaaaatgcaacactaaaaaaactccatgaggttttgcctaatggggtctttgtcgatactaatccagccccggaattatttgattccattcgcccaaatttaacgctgacagtaaaaaatgcaattgatctttttcttgataaaggatatcagcgcattggttttataggtggcattgggcctaagcatgatcatattcaagaagtagatgtacgtgccaccgcttttgcggagtatatcaaggtgagaggcaaaagtgatgaattgatgtttgttaatggcccgtttagcgttgctaatggctataagttgggaaaagaggtactggctaaatgcaaaaataaattgcctgatgcatttttaattgcttcggatactttggcagttggagttttgcaagcttttaatgagaacaatgttaatgtgccaaaagatactgcaattttaagtattaataatagtaatgtggttaagtatgtttcaccgccactttcttcttataatattgatcaacaagagatgattgatatggcattaaatatgctaacgaatctgattattcaacctaatcgggcacacattgatgtaaatatgaatactaatttagttgtgcgcaagagttttgtgcctaagaagtaaattaattagtaaataaaaatattttttagtaatactatcaaaagagaatgctaatttaattgatacaatcccactaaagtggacgattgaaatacataaagtattcaattatccatggaggtgggattttttatgtccagaaaaagtaaatattcattcgatcaaaagatatgggcagttgaacaatacttgaatggtaataggagcagcgttgaaatagctaaacggcttaagatgccaagtaaaagtggagcgatgcaagtaagaagatgggttcatcaatatcaaagcaatcgtgatacccttctaagtaatgctcaatacaataatcattactctaaggcatttaaagaaaaggttgttcaagaatatttagctggcaaaatgtcgttaccttctttagctaataaatatggcattagaagcaatggaacagtatcagaatgggtttccaagtataatagtcatatagaaaatcgggactatgatccccatccggaggtctatatgactaaagcaagaagaaaaactacccagcaagaaagaattcagattgttcaatactgtcttaatcacgacaagaattacactcaaacagctgtcaaatttgattgttcttaccagcaggtttacagctggacacacaaatatctagctaatggtgaaacaggattaacagataaacgaggcagacataagaagccagaagagctaactgagttagaactggctaatcgaaaaattaaggaattagagcgtcagctcaaagaagaacaaactaagaacgaattcctaaaaaaattagatcagttagaaaggatgtgcttgccggacaaccaagatacagacaagccgcaataaaaagacgctggaaacaagaaacatatcagttaatccatgactgccatcaaaagtacaattggaagattgatttaatgtgcaaatgggctaaaatagcacgctcagcttattacaaatactttgatcctaagcgcaagccgagtaagcgtgaagaacgagacaaaaagattgaagcaaagatcattgaaataaccaagtctaacaacagtctgtttgggacggaaaagatgaccatggcagttaatcgacagatgtctgatgaaaagccggtttatcataaaactgtttaccgcttgatgtgtatcaatggcattagatcacaaaagcctagataccagaagctaaagttcaagcatacaacgcctgagaaaacggccgaaaacaagttaaaaagagactttaatgcatctagacctaatgaaaaatggtgtacagatatcactgaagtcgttgctgctaacctgcctaaggcatatctatgtactgtgtttgatctatatgatcgctatcctgttggctacgcaattagtaaacgaaacgatactgctttagttcaagcagcctataagcaggctgttaaagcataccctaatgctcatccgcttttccatagtgatcgtggttttcaatttactcgcgcacctttccaaaaccaattaaaagaccaaggcatgacgcaatcaatgtctcgtgttggctgctgtattgataatggtccaatggaaggctggcaaggcattatcaaagaaatgcgagttattcttcatcctcaagtggccagttatgatgaacttaatgattctatttgtaagacaatagattactacattaatgaagatccacagaaacgttttaacggtttaactgctggtgaaaggcgcaaagaagcgatgaaaggcaatattaagaattgccctattgcaccaaatcatcgaattgagaaatactggcaaaaaatacacgaaaagaaaataagagaagccaaaaaatcctcagctgattattaatcaactgaggaataaaagctttatgtaattctactgtctacttgacagggaatgtatcaaatgcgttctctttttgtttagctttcagtaaagaatttattaaatataaataaattctttacttaacaaaaatagagaatatactaaactgtgtaaacgattacaattaatgattgctttagggggcaaatttatgacacacagtgacaagtcagggaagcagattctttcctacgcatcattctgtttgggtaacttaggtcactcggctttttatggtgtgatgagtacatattttattatttttattactagcagcatgttcagcggacttaatcagtccgttgcagataagctgatcggcttaattacaggattgatggttgtaattagaattgctgaattggtaattgatcctattctaggaaatatagttgataatactaaaactagatggggcaaattcaaaccttggattttaattggtactttagtaagtgccgccttattattagttttgtttactggcatttttggattagcacaaaaaagttggattctctttgcgattttatttgtactaatttatatcagttttgatgtattttattcattatctgatgtttcttattggggccatggtaccagctttaagtgaagattcacatgcacgtggtatttatacttctttaggtgccttttcaggaacaattggttggaacggattaacaattattgttgttccattagttacagctgtgacttatgcggtaactggtaaacatgaggaaggtgcaccaggttggttagcatttgcggcagtaatttcagctttggcaattgtatgtgccttgattgtttgtttcggtactaaagaaaagcataatattattagaaactcagctaagcaaaagactagcttaggtcaagtgtttggagcaatttttcataatgaccaaattttatggccaagtttagcatacttgctttactcattagcatatgtaattaccaatggtgttttgttctatatgtataaattcgttattggtaagccaaatgacttctgggtagttggtgttattgcaacaattatcggtttctgtattagtccaatgttcccaattctgaacaaatacattccaagaaaatggttattcatcgctggacaaacttgcatggttttagcttatgttttgtttattttcggcagagacaacgtatttttgatggacttgggcttggttcttttaaacattaactttgctcaattggtaactgttttaacattaactgacgcaattgaatatggacaacttaagaatggtcaaagaaatgaagctgttgttttagctgttcggccgatgattgataagtttaccggtgcggtttctaatgctttagttggttatattgcaattgctgctgggatgaccggttctgcaactgctgcagacatgactgctcatgatattagcacctttaatatggtggcattatatatcccacttgctttggcagtcttatcaatcgtagtctttttgactaaggtaactttatctgaaaagaaacatgccgaagtggttgaagaattaaaagatcaacttgcagaaggtaagattgaaaagaatgaatctaatactcaagttagacctcaagatcagactatctatgctcctgcagacggtaagttaatgaagatggcagaagtaattgacgaagatggtaagccattcccaggaaagggttttgcaattaaaccagattcaggcaatatttatgctccatttgatggtgtagttaggttcacttttggtactaagcatgcttttgaaattgtttcaaataatggtttacaagtagttgttcatgtcggcttaggtacagttaacttgcgcggtgaaggttttgaaacttattatgatgatggtcaaaaggtaaaaaaaggtgacttgctgttagagtttgatcgtaatttagctcttaagaatggctatcaggacactgtagttaccttctatacacaaccaggacgaattgtaaaatctagtgaaattgaagctggtaagattgttgagcatggtgaaaaagtattagatgtacaatttaagtagaggaattacaatgacacagttaaaacgttttttatatggtggggactataacccagatcaatggccagaagacacttggtcagaagatattaaagtttttaaaaaagcggatttaaattctgctacaattaatgttttttcttggagtttgcttgagtcaagagaaggccaatatgatttttcaaaattagatagaattattcaagaattgtctgatgcaaattttgatattgtacttgctacttctactgctgcgatgccagcttggatgtttaaaaaataccctgacgtagcgcgagttgattatcaaggacggcggcatgtctttggcgcacgacataacttttgccccaatagtaagaattatcaagttttagctagtaaattagtcgagaaaattgccgaaagatatagtaataaacctcatattgctgtttggcatgtgaataatgaatatggcggcaattgctactgtgaaaattgtcaaaatgcttttcgtacttggctcaagagtaaatatcaaacactagataacctgaatgaggcctggaatatgaatgtgtggagccatactattcatgattgggatcagattgttgttcctaatgagttaggagacgcctggggaccagaaggtagcgaaaccattgttgccggtttatcaattgattatttacgttttcaatctgatagtttacaaaatctttttcagatggaaaaatcaattattaaaaagtatgatactaacactcctgtaactactaatttccatggtttaccaaataagatggttgattatcaaaaatgggctaaagatcaagatattatttcttatgattcttacccaacctacgatgcacctaagtatttaccagcatttttgtatgacttaatgcgtagtttaaagcatcagccatttatgttgatggaatctgcaccgtctcaagtcaattggcaaccatatagcccgctgaaaagaccagggcagatggcagccacggaattgcaagcagttgctcatggtgcagatacggttcagtttttccaattaaaacaagcagtaggcggctcagaaaagttccatagtgccgtaattgcccactcacaaagaaccgacacgagggtctttcatgaactagaagatttgggtaaaaaattaaaaaagattggcccaactgttttaggctctaaaactaaggctagagctgctattgtatttgattgggataacttctggtcatatgagtacgttgacggtattagtcaagattttaattatatggaatcaatcttagattattatcgccaattttatgaacgcaatattccgacagatgtaattagtgtcgatgatgattttagtcaatatgatttagtagttgctcctgttttatatatggttaaagcagggctaagcaaaaaaattaatgcttatgtcaaaaatggtggcaactttgtcactacctatatgtctggaatggttaacaatagtgataatgtctatcttggtggctatcctggcccgttaaaagacgttatgggtatttgggttgaagaaagtgatgcaattgtaccaggacataagacaattgtttcactaaatggcaaggattataaagcgggtttggtttgtgacttgattcatccagaaaatgcaaaagttttagcaaagtactccaatgagttttatgcaggaacggctgcagtcacggaaaataaatatggtcaaggtaaggcctggtatgttggtactaagttggatcacattgggttgacgcagctattcaaccatattgttttgacagctaacgttgaatcattggtgggcgacagtcataagttagaagttactaagcgagttactcagtctgggcaagaattatactttgttttaaatatgagtaatgaagaaagaaaattgccacaaaaatttgtagagtatcaaaatattttaactggtcagcaagctcatgatcaaatgaaggcatgggatgtacaaatacttgttaaataaatgattttttccttaatgaagacaagaagttagacaaacgatctagcttcttgttttttacttaaataaatattttatttatttaagtaaactatttactaaaagatactgaagagatatactaataactgaaaacgattacagaataaatttgaggtaaaaacaatgaataaggaagaattacttaaagaatatgagacaacttttggtgaaaaaggtaaggatgtctttttctcacctggtcgaatcaacgtgatcggtgaacacactgactacaatggtggtcatgttttcccagctgcaattagtttgggtgtttatggtgtttacggcccaagagaggataaaaaagtttgcttgttttctggcaatgttgatggcgatatcgtggaattcgatattgacgacacaactgttgagaaagatgatcgcttttgggctaactacttcaagggcatgattacgtacttacgtgaaaaatatgacaacattgatcatggttttaatctttatatcaaagccaatttaccatcaggttcagggctatcatcaagtgctgccattgaaatgctaatgggcatcattttaaaggatgaatttaacttagatgttgaccggattgctttagccaagatgggtcaaagaacagagaatgaatttgttggcttgaattcagggattatggatcaatttgcctgcattatgggtaaaaaagatagtgctatcttcctcgattgcaatacattagattatgagtataagccactcgctttaggcgattacgaaattattattatggcaactaacaagccacataccttagccgattctgcttataatgatcgtgttcgtgaatgtcatgatgcagtgaagaagttgcaggctaagttagatattaagactttaggtgagcttgataatgatacttttgatgaatatgcatatctgattaataatgaaactgaaattaagcgtgctcgtcatgctgttagtgaaaaccaaagaactttgcgggcaacaaaggccatgcaagatggagatttggaaaaattgggacgtttgattgatgcttcacacgtttcacttcattacgattatgaagtaactggtcaagaactagatactttagctgaagcttcatgggctcaacctggcgtcttgggtgcaagaatgattggcggtggcttcggtggtagtgccattgcaatcgtcaagaaagaccaagctgaggcatttaagaaaaatgttggcaagatttaccgcgacaagatcggttacgatgccagcttctatgatgcggaaattgttgatggaactaagagaatttaatcaaacaagaggataagtatgaaagttattgaaaaatttgcggatgaagttattaatagtggagcgtatgagccgctcgatcgcgtatatgtgattaacaaaattcgcgctttagttggcgatgaggcaagtagcgttgaagctaatgatgaacaaacttcagttaagcaattagttgatttagccgtgcaaaataaaaagatttcggatgatgttacttcacgtgaagttttgaatgatcaactatacgacttgataacgccaacaccatctaaaactaatggcatcttttggcaaaaaatgcaaaaatcacctgaaaaagcaacagattggttttataaactttgcgaaaacaacaattatgtcaaaaaggaagcaattgccaaaaatgttgtattctcagggaccagctctaaaggacatggcttagaaattacaattaatttgtctaaaccggaaaaggatcctaaggcaattgcggcagcagctcatgcaactggtaagaaatatcctcaatgtgcactttgcctagaaaacgagggttaccttggtggatatggcaaaaatgctcgttcaaatttgagaattattcgcatgaatattggtggccgcccttggggatttcagtattcaccatatgcttacttcaatgaacattgtattttcttagatcaaaagcatattccaatggtcatcaaccaacaaactttgattaatttggttgaaattgaaaagacgttaccacattattttgttggttcaaatgctgacttgccaattgttggtgggtcaatgttagcacatgaacactatcaaggcggacgtcatacttttccaatgatgaaagctaagattaagaaaaatgtagtctttgatgattatcctgaagtggttgctggcattgtcgattggccaatgagcgacttgcgcttgattagcgataattcgttagatttgattgaattgggcgctaaaattattaatttctgggatcattattcagattctgctcgtcaaattaaggcttttgatggtaaaacacgtcatcatactgtgactccaattatgcaccgtgaaggcaagaacttcgtacttgatctagttttgcgtgacaacaacactagtgaaaattatccgttaggtattttccacccacataaagaattgtggcatattaaaaaggaaaatattggcttgatcgaagtaatgggccgtgctattttgccaggtcggttaaagagtgaacttgaagaagttaaaaaatactggttgggccaagataataagatggctattagccacaaagaatgggccgatcaaattaaagcagagcagaatattactgccgagaatgttgacgctgtgatgcagcaagctttagttgaagtctttgaacaagtattgcaagatgccggtgttttcaagaataatgcagatggcgatgaaggctgggataagttcattaccgctttaactaggcagatttaactcatcaatgtgtaaaacgagatctgttggatctcgtttttttgttagcggtaactcatatattctgatggttaaataatttataatatttatgaaagctaatacaaaagagaaactgtcaaatcttttgtgtaaatagatctttctcgtaaattgattttttaattatttatttaatcaaagtaggattctaaggtgtcctgaacctgaccaaagcctttatgaattcgattgaaataacggtcattgtagctcattgcctgaatgccaataaaagcatcaagcgactgttcagttggaaactctgccttaggcttagctttgcgcttgatcacattgttaaatgattcaatcatgttagtcgaataaattgaagctctgatctgcttgggatagttataaaagaccagcagatctggttctatgtctttcaagcttctgataacatggctgtaaaccttgccccatttggtatagaagtcatgcaggacagctgtggcttcttctttgtttgtctgttgatgcacctgtttgaattcgttcatgatcttttcacgatcgtcgacgcgtactttagcgcagatattgcgcatgacatgaaccaaacagcgttgaaaatgagctttaggataagtcctggccaaggctgttttcatgccaacaacaccatcagaaagaaaaagctcaacttgctttaagcctcgggatttcatgttttgaagcatatctgtccagacttcaatgttctcgctaggtgcaatgcagtagtcaatgacctccttgtgcccattaggcttgatgccaatggcaatatagactgcttcacgctcaaatgtttctcggcgcaaaggaaggtatgtcgcatccaaatagacgcagaaaaacttgtcgcttagcttgcgtttgtggtaagcctcaacctttggaatcatctgcttggaaatatttgatacctgagctggactgtaatggctgccatacatcttttcaattagatcggctatttccctggtggtcacgcccttggagtaaagcttgataatcatgctttccaagatatccgagtgctgcttgtagtcaggcagcgtgtgctgatgaaattgaccgttgcgatcccaaggcacttgcacttcaattgggccaaattgcgtatcaactttgcggaaataagcaccatttctagagttgccagtattccagccatttctggcatagggatcatagcccagaaaggcagtcaattcagcttctaacaagttattaacagcctgttgtagctctttgcgcaataaatcatttattttgtctggattgaatagagcttgagcaaaatctttggtaaaatcattcatgaaggagttcttctttctgtatgtgtttttttgttcaaaccaatcatacgagaaaggaactcctttttctaatgtttaaagaaataaatttaaggaatcattcatccttacacaaactattttacagtctcacaaaagaagggcaagagtatgaagacaagttttagaaaatatggcagaaaagataataaagatctttgtgaaatcacactagagaatgatcacggtatggtagttaaggtattgaactatggtgctacattggaaaaggtgttgcttgatggtgagaatatgattttgtcactggataagccagaagattacgacaaggagcgtaattatctaggcggtacggttggacgtattgccggaagagtgagacgaggtttatggcggcacggcttagaattacatcaattaccaatcaatgaagggcctaaccacattcatggtggtattgggactgatactgaaatttgggattttagacctagttgtaatgaaaaaggtgctcgtgttgatttaacactttttgatccagatgggcataatgattatcctggtaatttaaaattacacgctcgttatgagttagataataacaatattctgcattattcattgggtgccatgagtgataagctgactatttttaatccggttaaccatactttcttcactttaggtgaaaagaaaatgattaatgacttgcaactgcaaatgaatgctgattattatattccagttgatgagactggcttgcctgatcgtggtatggaaaaagttgatggaacagcattcgattttagaaagaagaagcgagttggggatgcattggaagctgatgatccgcaaattaagaaccgcgatggaatggatcatccatttatcctggatggcaatatgccaaatgcagtgctaacttctgctaaacacaagttaacggtaacgactaatgctccatccttgattctttatacaggaaatggatttgatcatactggtaaatatacggctgattttggtccatattgtgggattacgtttgaagctcaagtgccgccagcagaaggtgatgatttgggacgcatcacgcttttgccaggtgaaaaatttaagcggactgttgattggaaatttgaataaaaatatggagaacatccttactgaatgaagtggtagggatgtttccttcttttggatattatgatttgattttacaagtaaatctatattaatatttagaaatcaactgaaaggtatagtaaaaatgatgacaaacgaaaagattattgctttagtcaaggaagaatatctaaacaagattccaaaaatttttcgcaagcatgctgttgaaggcacttgcaagttaatcgctagagaacatcccgatttatacaaggcttttgaagatggtgaaccaaccgcagaagaaaaacaacaaatgacagagttgattaacgggattttcgaacaaagaatgaaaaagcataagatgttataaaaagacgctggaatgtaatgattattagatcgctacattctagcgtttttttgattttaattttgatttattaaactaacaggtagcgtataaacactttctaatgaaacagagggatcattaatttgacgtaaaagtaaatcgcacattaattcagcaatttcttttgtatgttgccgagcgctaattaaatttggaaaaagactttgaatcaaatgactaccatcaaatcctgtgattaaaggtacttttcctaaataatcagcacattctttagctagtaaagctgtaatgtcatcggtacaacaaattgcatcatattcgtcatcctttaaaaattgaaggatggctatttttttagcaataattgagtcactggcactgagtgagcgaagatcgaatttagaatcaaaagtgttaaatacgcgaatcattcctttgattcgatcacttattgggtaatagtcttctttagcaccagcaataataataattttctttttcttttgttttagaacagattgtgcgatttgcatacctgcgtcatagttattagattgaacagttggtatttgaggactaattttacggtcaaagctaacaataggaaactttatttttagtccttttttaggaatcttaataggagagctggtgatcagtccagcgatttccttttgtttaaatcgctctaaatagtaattaatatcttgggattgatagtgatctagatgaagaatacaatcgtatcctttttcctgtaaataaaaggctagatattcaaataattcagaataaaaaggattattaatttttggaaaatcaacctcgattaaatttaatttagatacagagttgacggtaccttttactttatatcctaatttttttattgcttctttaaccttaagagcagattcaatacctacatatccattttgattaatatatcttgaaactgttgctatcgaaacgtttgcttctttagctatatctttaatagtaactaccatattttttcacttccttatgtaaatattacacatttaaaatcctatatcatagtattttgacttatttaaatgtgtaaatttgtgtaaatccattgaaaactgtaaatagaagtgtatgatgtaattgtaaatatgatagcgcttacttaaatagagcgatatttgatcaagaggagtgaaaatttatgaaaaagtggctaaaaagaatagctttaattagcttagtcgctacgatggctttaagtttgacagcttgtggtcaaaataaaagcagcaattctggtaaaaaagtgacaattgagtactttaaccagaaaaaagaaatgtcagcaactttgaaagaaattatcaaagactttgaaaagaaaaatcctgatattcatgttaaagaagttgacgttcctaatgcaggtacggttttgaagacaagaatgctttcaggagatgttcctgatgtaattaatatttacccacaaaatattgattttcaggaatgggcaaaagcaggttattttgaagatatgactcatgcttcatatattaaaaacattaaaaatcactatgctgattcttttaaaattaacggtaagatttacaacgcactacttagtgccaacgtttacggtttcttctataatgcaactgaatttaagagattaggaattaaagcgcctaagactggggccaaatttgaacaaattgttaaaaaaatcaaggctagtggcaaggcaccatttgctgtagctggtactgaaccttggactttaaacggatatcaccaattatctttagctactgttacaggtggtgctaagcaagctaaccaattacttaggttctcagcgcctaacggcattaaagtaaacaatccttatattcaaaaagattttactagattgaacttacttcgtgaaaatgcacaacaaaattggcgtggtgctagttacaacgatgctgttgtttcatttgctaatggtaaaagcttgattatgccaaacggttcatgggcattacctatgatcaatcaacaaaagccaaaatttaaggttagaacatttgcttttccagcagcaaaggctggtcatgaaatgacagttggttcaggcgacttagctttgtctatttcatcaaagagtaagcacaaaaaggcagcagaaaagtttgtagcatatatgacaacacctgctgcaatgcaaaagtactataacgttgatggaagtcctgtagccgttaaaggtgtaaagcaaaggggaattaattctcaattgggaggcttgtctactttggctttcactaaacacgatatggtttggttagcacaagactggactagtgagaatgatttcttcaatttgacggctagttacctgatgactggtaataagcaacaaatggtaaatgatatgaacaccttcttcaatccaatgaaggcttctaactaggaggattaaaaaatgaaatcaaaaagttttattgaaaaacattggggttggttgtttttaatcgttccattgattttacaagcaattttcttctattttccactatttcaaggtgctttttacagttttactaattggactggtttgacttataactacaagtttgtaggaattaataactataaattattgttgatggatcaaaactttgctaaatccattggttttactgcaattctaactatttcattgattattggtgaaattgtaataggtattttagtagctagagcattaaactcaaagatcaagggtcaaacattctttagagcctggttcttcttcccagctgtattgtcaggtttgacagttgctttgatttttaagcaagtattcaattatggtttgccagcaattggtaatgcacttcatattgaatggcttcaaacaagtttattaggtactaatactggtgcggtaattgcaactattttcgttttgctttggcaaggtgtggcaatgccaatcattatctttttagcgggtttacaaagtattcccgatgaaattaaagaagctgcggagatggacggtgctaatagtcgtcaaatcttctggaacattgaattgccatacatgttaccaagtatttcaatggtctttattttggcattaaagtcaggtttgacagccttcgatcaaatctttgcaatgactgcgggtggtcctaacaactcaactacttcacttggtttgctggtttataactatgcgtttaacaataactcatttggttacgccaatgcgattgccattgtcttgttcatcttaattgctattgtttcattcattcaaattaagatttctaacaagtatgccgttgattaaagaggagtatcaaaatggaaaaagaaaataaatcaaagaagttttgggattatgctttactgattgtcggtggaattctgattttaattccattgctctatacatttttaagttcatttaagacaactaagcaaattatgaatcatttctttgcttggccaaatccatggacatcagttaactttcaaagattgtttgcggatggagtaatgggttacttctggaactcaattgtcattacggttttatcaattgtcttagtaatgattttcgtcccaatggctgcttactctattgctagaaatatgtcaaaacatacagcctttaattggatgtatatcttgctaatcattggtatcttcgtaccattccaagtaattatgattccaattactgtcatgatgagtaaaattggcttagctaatatgtggggcttgattattctgtatttaacttatgcagttccacaaacattgttcctttatgtaagctatatcaaacagagtgttcctgaaagtttggatgaagcagcagaaattgacggtgctaataagattaccgcatatttcaagattatcttcccattattaaaaccaatgcatgcaacaacattaatcattaatgcaatgtggttctggaatgactttatgcttccactgttaatcttgaacaaagattcaaagatgtggacattgccattgttccaatacaactatacaggccagtatttcaacgattacggtccaagttttgcttcatatgtagtaggtatcatcacaattacaattgtttacttaattttccaaaagaatattattgccggtatgagtaacggtgctgtgaagtagttaagaatagagacgaggttttaacaatggttaaggtagatttagatcacgtatataaaaagtatgatggtaatgataagtattcagtaacggactttaatttacatattaaagacgatgaatttatcgtttttgttgggccatctgggtgtggtaaatcaactactttaagaatgattgctggactagaggatatttcaaagggtactttgaaaattggtggtaaagttatgaacgatgttgctccaaagaaccgtgacattgcaatggtattccagaactatgctttgtatcctcacatgtctgtttatgacaacatggcctttggtttgaagttgcgtaagtatagcaaggaagatattgataagcgagtacaacgtgctgcaaagatcttgggcttgacagattacttaaagcgtaagccatcagcactttctggtggtcaacgtcagcgtgttgctttgggacgtgcgattgtgcgggatgctccaatctttttaatggacgaacctttgtcaaacttggatgctaagcttcgtgtaacaatgcgtgccgagattgctaaactacaccaacaattgaagacaactactatttatgtaactcacgatcaaactgaagctatgaccttagctgatagaattgtcattattaaggatggtaagcaacaacaagttggtagtccacttgaagtatataacaaaccagctaatgtctttgttgctggttttatcggttcgcctgctatgaacttcttccatgtaattttaaaggatggcaagatcattgataaagataatcatgacttcgaaattccagttccagaaggtaagttaaaggcattaaaagaaaaaggatatgacggaaaagagttgatctttggtatacgtccagaagatgttcatactgagcaagtatttttagaaacctatccagacaatgttgttgaagctaaagtggtagtttcagaattgttaggtgctgaaactcagctttatactaaagttggtaatactgaattggtatcgaaggtagaccaaagagactatgctaagcctggcaatatggtaaagatgggctttgaaatgaataaggcgcacttctttgatcctgaaactgaagtagcagttgagaactgaggttaagtaatgactaaaaacttaattacatttgatgaaaaaaataaagtttttcatttgcataatgaccaaatttcatatctgatttcaattgaagatggtggcacactaagtcacttgtatttcggtaaaagtatcaaagcatatcatggtgaattgcggtacccacgacttgatcgaggcttttcaggtaatttacccggatcattagatcgtactttttcaaaagattctttgccacaagaatacagtagtgcaggcgaaatggactttagaacgccagcaatgattgtgcgccaaccagacggttctaatgcagtatttttaacctatgaaaattatcaaattgtgccaggaaagcctgaactaaaaggtttgcctcatgcatgggtaaagaataaggatgaagctgaaactttaatcattactttaaaagataagtttagtgagctgagatttgacttgctttatacaatttatcgtgatcgttcggtaattgtgcgttcgactaaagttagaaatgctggcaaggaaacggtaaaaattgaaaaagtagcttcgatgcaaatggatttcgtagatcgtgactttgacatgattacactgccaggtgcccatgcgcatgaaagacgggttgaacgaaacaaggttaatcaaggaattcatgtttattccagtattcgtgggacatcaagccatcagatgaatccatttgtagcgttggctgatccagatacaaatgagtttgatggggatgcatatggtttcgcctttgtttactctggcaatcacaagtttgaagtagaaaaagatccgtatgcgcaaaccaggattgttgttggcattaatgattacaactttagctggatgctaaatgcgcaagagagtttccaaacacctgaagtattaatggtttattccgatcaaggtttgaataagatgagccaagctttccatagtatcattcatgatcgcattatgcgaagcaaatacaaagatcaggttcggccaattgtggtgaataactgggaagcaacttacttcgattttgatgaagataagttaaagccaattgttgataaggctaaggaattaggcattgagatgtttgtgcttgatgatggttggtttggccatcgcgatgatgataattcttccttgggcgattggcaggtctttgagaaaaaattccctcatggcctagatcactttgccaattacgttcatcagcaagggcttaagtttggtttgtggtttgaaccagagatgatctcaattgattctaatttgtatcaaaagcatcccgattatttgatgcatgttcctggaagaacaccaagtccagctcgtaaccaatacttgcttgatttaggccgagcagaagtacgtaataatatttttgaccaaatgaaagcaattcttgactcaggcaagattgactacattaagtgggatatgaatcgccacttgtctgatatttaccaagctgatttgccagcagatcgacaaggcgaagtctatcaccgttatgtattaggtctatatgatttacttgaaaaaattgttgatcgttatcctgacctcttaattgaaggctgctcaggtggtggtgggcgttttgatgcaggcatggcctattacaacccacaaatctgggctagtgatgatagtgatgcaattgatcgcttaagcattcaatatggcactagtttagtctatccacaatcaatgatgacttcgcacgtttcggttagtcctaatgagcaaaatggccggattacgccgtttaagacgcgtggtattgtcgcaatgtggggggatttaggttacgagcttgatttaactaaattaagcgaatcagatcaaaaggctgttgctgagcaagtagctgaatataagaaaattagagcagttactcaatatggtactttttatcgcttgaaaaatgcgcaagaaggcaaccaatgtgcatgggaaactgtttctcctgataaaaacgaagtagttttatcaacagttaaggtcatggccagtgcacagccatactttactaaaacaaaattagttggtcttgacccgaataagcagtatgaagatcaggcaagccaccaagtatatggcggtgatgaattgatgaacctaggaatttatgatccggttgaacatggcgatttcatggcttatcggtatcactttaaagcaattaactgaggaaatttgtgatggcaattaagaacaaagtaatgttgattacttatcctgatagtttaggtaagaatctaaaagaattaaacgaagttttacataaagacttaaaaggcgcagttggtggcatccacttattgccattttttccatcaactggtgatcgtggctttgcgccaactgactacactactgtagatcctaagtttggcgattgggctgatgtcgaaaaattaggtgaagaatattacctgatgtttgactttatgattaatcatatttctcgtcattctaagtattatcaagattttcaaaaaaataaggatcaaagcccttatgctgatttattcctaagctgggacaagttttggcctgaaggccgtcctactcaagctgatgttgatttaatttataagcgtaaggaccgtgcgccttatcaggaaataacctttgccgatggtaccaaagagaagttatggaacacttttggacctgaacaaattgatttggatgttcgtcaaaaagtaactcaaaagtttatcaaagatactttaactagtttagtccaacatggcgcagacattattcgcttagatgcctttgcttatgcggttaagaagctagatacaaacgacttctttgtcgagccagaaatttgggatctacttaaagaggtgcaagctgatttggctggcgagggtgcaaccattttaccggaaattcatgagcattattcaatgccattcaagattgctaagcatggctactttatctatgattttgccttgccaatggtaactttgtattcactgtattctggcaagagcaatagtcttgccgcctggcttaagaaatgcccgatgaagcagtttactacgttggatacgcatgatgggattggtgtagttgatgctcgtgatattctctcccctgaagaaatcgactataccagtcaagagttatatgaagtcggcgctaatgtgaaaaagaagtattcaagtgctgagtatcataaccttgatatctatcaaattaatactactttttattctgctttaggcgatgatgatcagaaatacttcatggcgcggttattgcaagtctttgcgccagggatcccgcaagtttattatgtagggatgctggctggcaagaatgaccttgaattactggaaaaaactaaagaaggtcgcaacatcaaccggcattattacagccgtaaagaagtggctgaggaagttaagcgtccggtcgttagttcgctcttaaaattatttacgtttagaaacaatgaacctgcctttgatcttgatggttcaattgaagtctccactcctaatgaaaatgaaatccaaattattcgtaaaaataaagagcaaaccagccaagccgaattaaaagctaatttaaaagatttaacttataaagttgtagttaacggtcaagaagttaaattttgatcttttccccctctagatgaaaaattaaacaatattaatataaataagcaaccttgctcaattttagtaatggttgcttattttagtttcttgtgacttatcacaaaatatattagctttattcaaataaaaatcaaataatcttgttatgattaaaaagggaagaagggataaacgttgaatatttatgggaaatacgccccaactttagataaattacttgatcaaatgatgacgcaatttgagcagttaaataaaaattatgaaaaaggacatggagaacgtctctatgaacatttacgtggtcgggtaaaaagtgaagccagtatggaaggcaagtgcaaaagaaaagatttaccgttaacgccacaatcagctttgcgtgctaatcgagatagtgttggattgcgtgttgtctgcaattttattgacgatatttatacctgtattgactttattaagcagtgggataatgttaatgtttatcaggaaaaagattatattactaatgctaaaactaatgggtatcgttcatatcatatgatttttgacgtgactgtacctgatgaagatgttgacggcaatataccgggtcattattttgttgaagtgcaattaagaacaattgcgatggatacttgggctagcctggaacatgacatgaaatataaacaccagattaagaatcctgagatgattggcaatgaattaaagcgagtagcagatgaattagcttcttgtgatgtgtcgatgcaaacgattcggcagttaattagggaagaggattaatgagttaatgaagattttagtagcagaagatgaaccgcaactattgcgggttttaacagtggccatggaacacgcgggttatgatgtggatccggtagataatggcttaaaggcagtcgagcatgctaaagaaaattcttatgacgtaattatgctggatatcatgatgtcagtcatggatggaattacggctttgaaaaaattcgtgaaagtggcgataagacttatattttaatgttgacagctaaggccgaggttgatgaccgagtaactggtcttgatagtggtgctgatgattatctgactaagccattttcacttaaggaattgttagcgcggctgcgttcaaaagagcgccgtgaagatgactttactcctaataagttggaattaggggatgtaactttgaatgtgactaagcaggagttggctagtcataattcaattcgtttgagcgggactgaaactcaattgatgaattactttttgttaaatcaaaataaggaattatcaacagaagagttgcttaatcatgtttggaaaaatgatcttgatgccaatagcgaggtagtctggatctatgtttcatacttgcggcaaaaattgcaatcaattcaaagctcagttcgaattgaaggcgataaaggtggttcatataagctagttaagtaggtgagcagatgattcaaaaatttcggtggaagtttattggtacttctgttgctgccttgtttgtagttttgttgttgacgttaggcggcttagtttgggtgactcatgttcaaagccaaaatgaagtcgatcgcgtgctaacggctttggtcaaaaatgaagggcgtttgtcaccaaaaaatgccaaaccagcctttggcgatcaacatgatccaattaatcgcaattttttaggtgggcagtataatcccgaagcggtttatcagtatcgctattttgcggtaacaattgatgaaagccatcaggtacatgtaattaatgataataacgtttataaaattaataattccaagatacagactattaccagatcagctttagaaaatggtgataaaagtggtgtagttgccttaggacaaaatcaatatgcctttagggttgtaaaaaattctactggtgaaatgatgattgtttttttgaatgaaactctgatttttaaccgtttttggttattatttagagtagcgttagttttaggcttaggcgctttgattgtctttgctttagttttgattttagtttcgggcaaggcaattaagccaacgattgatgcttatcacaagcagcaggaatttattaccaatgccggtcatgaattaaaaacgccactagcagttatttccgcgaatacggaaatggaagaaatgctgggcaataattctgaatggaatgaaagcaataaagagcaggtggctaaactaactaagttaatcaatcggttgatttcgctggctcgagctggcgagacgggtgagcttaccttaagcaaagttagcttttcagaaatcgttgaagaaacgactaaagattttaaatcagtcatgaagaagaatgacttagtctaccaagtatcggtgcgggaaggcttaaatgttttagctgaaaagcatactttagccgaagtagttaatattttgctagataatgcgcaaaaatattgtgatcctcatggcaagattcaggtgaaactgactaagggcggaactttaagcaaatatgcggtcttgcgggtagaaaatacctatcgtgaaggtaaaggcaaagattacagccatttctttgatcgtttttatcgcgatgatgagtcgcataattctaagaaaggtggctttgggattggcctggctatggcgcaagagttagtcgaagcctttcatggcaaaattttagcccaccacaaaggtgaagacattgtttttactgttagtttaaaaattgctaaatgatcattctgtgatagttgtataattagagcagaattgggggatcattttggcgaagagaaaatcaatttataccaaagatgttgtcctagttatggcagcatctttcttttttatgtttagtacaatgtttgttaatcctttgatcaatggctatgccaaagaattaggcgctagcagtgcttttgcgggaatcattgttgggattatgagcttagccgccatgtttttgcggccggtagccggtaatttgactgataaattttctaaataccgcttatcatttattggcggcgttttgatttttatcggagtcatggggtatgttttgactctatcaagtggctggcttttgctttttcggctgattaacggtactggttatgtcctttgcacagtttgtatgactacttggctagcctttttagtgccgcgccaacacgttggtgaagcaatgggcttttatggcttaatgaatgctttggcaatggcgttagcaccagcagtttcaattaatatttatcaaaaaataggttatcgcacaagcttgctagcatcagctgtttctgctttattaatgattgtggccattcagtttgtgggtgatcatgctttgcctaaaaagcgagttcgaacgcagaagaagagtttcaaaattatccagtttaatgttttaccggtagcaattttgacaactttatttgctatcccgtattttgtaacacaggcagatattgtaacttatgtagaacaaaaacatctgactgtcgcagttgggtcatatttcttgatctatgcggttgttttgttgattattagagtaggactaaaaaggtattttgatacagtacgttttggcgtctggttttggctaagtctagtttcaacggctgcttatattatcttgctcgcaataatgaataatgattggcaaatggctttagcggcagctttaatggcatcaggctatgggatcatttattcagttttgcaatcaactgcgctgttgttagcaccgattgaagaacaaggcttagctagtgctaccttttatttgggactagacattgcgatggcctttggcccaatgatcagtggtgtaattgattctgctttaccgatagaatggttctatccagtagaattagtcttagttccattgattttagtagtttatttcatttggcgtaagcgtttgaatggcgcaattgaccatcattagagggaaaatatgagcgaatatgtagttaaatctaagttagaagataaagaatggcaaattgccaaccaagtacgtgatcatgtttttgtttgtgatgatgttaaacatgatgcaggtcccaacccagttgagtatctatgtagtagtgttaattcatgtattgtaatgtcggcagggatgattactaaagcacatcaacttgatgttaaaaattttagggtagaaaaccaggcaaaaacggagaatctcggtcatggtaaatcagtagtaactgagatgaagatcaaggtcttctttgattcggcaatgactagagccgagaaggaagaatttttagctcatactttgcatgtttcaactgtttatcaaactattaaagcagctgtcaaaatttatgtggaattaggaaaataagcgatgagcgagccatattacaaacaagaataccagggtgaaagaaagttagatggtgaggccccagtttttagttttgatcaaattatgaaagaaacttttctgcgaccatttatctggaatgcaagaactaccagaagaagtttctggattggaatcgttattactgaagttataatttggattggtggaattattacatttttggcaactgttatgccagtttctcactatgagaatgattcagctgatatgataaatggttttgcttttaatggtgatcacgcttcgatgattgtcattatcggtatgattatttggggcttgatctatctttatttgaaattatgccaattaggcctagccgtaagaagattgcatgatatcaattatacaggttggtggattctgttaatgctgataccgttaggttggatttttgttctgtattttgcaattcagccaagtaaacaagagccggtgaaatggggaacgtatctttaccttgacgaataataaaaaatgttataatttaactacgcgtggtgctagttaaatcgttttagttaataaaaaagtccaatcttgttagactcgacttgtaaatagtaataatagaaaagagtctgatctgattgaactgccttaagcttaagcgttttagccaccatttacaagttagttttaaagatttagtgataatttgtcggcactggtatcgtttgtatgcaccggctgagtttactcatcggcgaaatattgatcaaattaaaactacggacagtctgattttggctttacttatctggcaagctaagacaggaattgaatcacaaagaagattctgtgaatgtttcaattgtttatcacactcacgttttaatcggcgttcacgtcagctattgcaattgatttatcagatacggcaagaaatgaataaaaaggttgacctgaatggacagttcttgatcattgacagctttccggtacctgtttgccaaccaattcgaaactatcgtgctaaaatttttcgcggttatgccaacattggttataaggccaccaagaaaatttacttctatggtttcaaagttcatgccattgttagcgatgacggttacattcttgattatgtcgtaacaaaggcatcagttcatgatgccagggagacagttgaactgatagaaaatacccatccatctaattactatcttcttggcgacgaaggctatttaggcaaagaactgcatcaacagctaaaacaaatgggttacgaactttggacaccatatcgtaaaaatatgacaggagctaaaaagcacaatgatcatcaattgatggctattcgcagaacaattgaaagcgacttttcgcttctgacctattacaatgccgagaacaatcgagcacgtagtctgataggctttcaaagccggttggaaattgcaattttagcttataatttggcttattgtctagaacgatttaactagcaccacgcgtaatttaactataagagattacgttaggagattatatcgatgaaaactaagaatttatttacttcattagctgccgcagtgatgctttcagctggtttagctggtgcaggtgtgtctgctgcagaaccagttcatgcagcaactacacaaacttcaagcaaaaaaggtaccattagtattaagcgtagatcagtatcagctacagttaataatgctaatcctaagctttacgctgtaaaccaagatggtaaaatcgtaaagtcaatggattcaaattatactaaaggtcaaaccatccagctttacttttctaacgaggctaagaacgatcaaggttctgttactttctattatgttgacagtcaaactgtagatggacaacaatgtgcaatttatgttgtttcgactgatgttaccccttcagcaacagttccaagtcaagcagactggtcaaagcaagcacaaagtgacaaaaaagccattcaagatgcttacaacaatagagcattaaagtacatcgttgtttcacctaagtcaaaaaagggtgcaaagatctactacgcatataagaagagtgctaaggctaaaaaggtttactttaaggcaaccaagaagaagatcaagtacggtaagaagtacaagtcatcgatgatcgttaaaaacggtaagagcagatatgcttatattggtaagaagagatacttaaagacctctactattaaagtagtaagtgttaagtacgcaccagttcaattatcagatgatttgaagaacttaattgttcaaaactagaaaaagttaataaaaattgtagcgtaaaggatgaattattgtcctttacgcttttttgatctaaaaattaataataataatattgataaaaaatctcactgacctacaatagactttgcgttatttttagggagttgtaaaaataagaatgaagagagtaaaagtctatttaggattagcttgtttgatgacgttattatgtttgaagccgcaagtggtttgggctcgagaactaaatccatttcagactaagatgattaatccgcatacgtcttatagaatttatcaaaacttaactcgtaaaggtccgtcaagaagtctatgccttgctaatacgtttaaacatggcaatgttcaagccagtgcagttagaaaagttcgcggcaataagtattgctatgtttggttagacggacatagaggcggttgggtcaatcagcgagcttttttaagaagaaaaattgcagttgtacatcagattagtttagtgaagaattcgcattatagttttccaactagggatgcgattaattatgcaacagatgcagcaggaacggtaattgagccaagtaaagttaaagtatctcgagcagaagtttcatcaagtaaaaaggaaagctatcgggtaagttattcttatggtaaagctcatgctcagacagttgttcaagtgagagctaatgctagagagggcattgttaaagcaaccaaaaaaaccacaagctggagacagtgctcgtagctggttcaagcactataagacgtctggtaattggggtagaagctttgctccggaaactagaccgcatgttttgaaaagtggacattttagactgaaaacctatttctatcaacctgcgactttatgtcaaagtgattcggtaactggaacggtgggaccagtaccagaagggcttactgtatcaaatggttcaatgtatgccacaatgtatcattcacctaatgatacgcgtgctcacattgtttcttacaaatttaatcaagtgcctaatcgctatactatgcaaaagttgccatggctaccttggtcacaatttctgcggcttgtatcccatgttaagacaagcccatatattaaattgggacatggacaagcaatcggttcaactcgaaagtatatttatgtgattgctaataaccatttattgcgcaagagctctcaatcagaagaaattatgcagattagtaaaaacaatttgcaaattaaacagatttggacttttaaagtttggaatcattcagctagaacaggtcgttatttccataatgctacttttgtaaatgatcaccaatttattgccgtttaccgtgatgccacagaccaccgttttgaatattgggaagttactcgtcagggtaatagttggtatcctaaagagattggcgctactagaggagattttatgcgcaatgattctcccgttcaaggaattacctatgacaagcataaaaaacagatttatttggcctttaatgattatttgtttaaattgaaacgctcaggtaaagtgctggctagaggtcactttcatacagggcgtgaatttgaggggattagcataaatggtcgtcatttatacgcagagctggcgcaaaggccagaattgttgaggcagaggataagataataggtgtaaaaatatgttatacccagataaattctatttaacacaagatttaaatagaagatttgccagaactaaccttgctcgactaatatttagtgatttgcattttgagaaaacaaatatttctttaattcaaacacaattagttgctgatgggttaaatatagagagggcttccgagaaagataaggaaagaattattcgattaaaacgagcatggcaatatattattaatgaaaataaggtgttatctttagatattgaactaaagatacatttattactgacaggctatggcttccgagataatctaaactacaaacaagaagaaaaatttttcgatgagttaatgaacaacgatacctcgactacagataaggcaatgacattgatgtatcataatatgcgtaatcaattattctggggcggaaataagcgtactgccacactagctgcaaataaattaatgattgaccatggagcaggtttaattaatgccccacttgataagtgggatagatggaacaagctgattagtcaatattatttaaccggcaaaatgaatatgttaaaagattggacctatgaaaatggcattcaaggagtagtgctgaataataattcagatttacctaaacctgatattaatccagaagattatgattaattacttaagcagaccgaataggcctgctttttttgtgtgcaaaagctctttttgaaaatatcatgataaaagttcataatagaaattgtttgtttatgttaaaggagttgttttattttttatgaagaataatgatcacgttaagataagtcctagtagtcttgtcttgatgattttttcttctatttttggatttagtaattcactgacagctttttatcaaatgggttattcaagtatcatttggtatattgtcacagctattttattcttcctgccatcagccttaattttcgctgaatatggtgcttcctttaaaggaattaaaggtggaatcttttcatggcttgaaggatctactaatgaaaaagtatcatttatcggaacttttatttggctggcagcttgggtaatttggttagtttcatcaacccaatttttcttagtttcagtttcaacggcaatttttggtcatgatactaccccaagctggcatttagggtcgctgacttcaactcagttattaggtgtgttggaagttattttcttagtaattgttacattttgtgccgcaaagggaattgataaaataaaggcgattaataatattggtgggatctttactttaggaattgccattggttttacagcagtttcactttttgtctttattttgaatcatgggcaattagctgaaccagtgaccgcacaaaatatggttcattcacctaatccagcatttcagtcaccgattgcggttatttcatttattgtctatgctttatttgcctatggtggtctggaaacaacctcaggagtaattgattcagttgataaaccggaaaagaattatcctaaggctctgattacggccatggtcttaatgacagcactttatgttgtaaacatctttatgtgtggggtggctgttaattggaacaaatcgttaggtggtaaaggtgttgacttagctaatgtcgaatatgttttgattaataatttaggtattgtcactggtcatagcctaggtctatcacattctacttcactggcaattggaactgtcttttctcgtttggccggaattgcggatgtgttatcaggaattgccgctgcctttttgatggtttattcaccgattaaatcatttattgaggggtgtgatccgcgactattgcctaagaaaatggttaagttaaataagcacaatatgcctgaattctcgatgtgggtacaagcaattgtggttagcgttattatcttatttatttcatttggtggtaatggagcacaacaattctatacaattttaatggatatgatgaatgtttcttcatcagcaccatatttatttttaattgctgcttacccattttttaaagctaaaaaagacttagatcggccatttgtttttattgaaggtaagaaaaaagtttgggcaacgacaattgttgtttggttagtggttgcggtcggaattatctttacttgtatagaaccactctttaccggagactggcaaacttcattctggacggctattggtccagtggcctttggtgttattgcttggatttattacgcatataatgaacgaaaagaaaaagcaatggcttaatacgcaaaataagacgaaggattttgtccttcgtcttatttcttttctctattttttactttaagccagctactctgacaacatcacgttcaatcattaattcctaattagttggaataaccataccaacaatagttgagtcgggcttggtaataatggtggcattttctttattagcggctgaatcaggcttaaggcctaaaagttcgagtgaatccatgacatgttcacggacaccaaagtcgtgttcaccgacaccagctgtaaaggcgataccatctaggccacgcatttcaagggtataagcaccaacatagcgaatgattcgattaatgaaaatgtttctagctaagtcagcacgcttcttcttttccccttcgagcttagtcatgtcaccacgtaaatcacgcatatctggtgaaatgcctgaaattcctaacaaaccagattcgttgtttagaaccttaagcatttgatcagcatcaagattttcctttttcatgacaaaagcaagtaaagaaggatcaacatcacctgaacgggaactcatcgtaatacccgccattggtgaaaagcccattgaagtatcgaatgatttaccatctttcacagcggtaactgaagcaccagatcctaagtgacaaacgattaatttcaagtcctttaagtcgcgtttcataatttcagcggctttttgactaacatatctaaccgaagtgccatgtgcgccatattttcttgcaccgtatttttcatagtatttatatggaagtgagtacaagtagtgcactggatccaaggtttggtggaatgaagtatcaaagacagcgacttcagggacgccaggcaatactttcatgaaggcattaatgacatcggcttcagcggtattatgaagcggcgcatattgtttcaaatcataaatcttttgtagtgacttttcatcaattaaggtggagtccttaaattcttcaccacccgcaacaattcgatgtccgattccgatgatttctttaggatcgtcaattaaatcatacttttttaaattttcaagcaagattgtaacggcagtttcggaatcaggaatgtcaactttttcttggtgtttttcacctttaaccttgattgtaaaggtggagccgttaagcccaactcgatcagccatcccttcgctgataactttttcatcaggaaaggtgaaaagcttaaatttaaaagaagagctacccgaattaatcgctaaaatttttttcataaattatgcctctttttcttaatttttgcagtgcaacctatccagtaagggcatgcaataaagaaaatgccactaatctgctttaagtaagttcttgcagtaatagtgtcaacgtctttattatacaacttttgctgtaagctcttacagatatgaaactgtcaaatcttttgtgtaaatagatctttctcgtaaattgattttttaattatttatttaatcaaagtaggattctaaggtgtcctgaacctgaccaaagcctttatgaattcgattgaaataacggtcattgtagctcattgcctgaatgccaataaaagcatcaagcgactgttcagttggaaactctgccttaggcttagctttgcgcttgatcacattgttaaatgattcaatcatgttagtcgaataaattgaagctctgatctgcttgggatagttataaaagaccagcagatctggttctatgtctttcaagcttctgataacatggctgtaaaccttgccccatttggtatagaagtcatgcaggacagctgtggcttcttctttgtttgtctgttgatgcacctgtttgaattcgttcatgatcttttcacgatcgtcgacgcgtactttagcgcagatattgcgcatgacatgaaccaaacagcgttgaaaatgagctttaggataagtcctggccaaggctgttttcatgccaacaacaccatcagaaagaaaaagctcaacttgctttaagcctcgggatttcatgttttgaagcatatctgtccagacttcaatgttctcgctaggtgcaatgcagtagtcaatgacctccttgtgcccattaggcttgatgccaatggcaatatagactgcttcacgctcaaatgtttctcggcgcaaaggaaggtatgtcgcatccaaatagacgcagaaaaacttgtcgcttagcttgcgtttgtggtaagcctcaacctttggaatcatctgcttggaaatatttgatacctgagctggactgtaatggctgccatacatcttttcaattagatcggctatttccctggtggtcacgcccttggagtaaagcttgataatcatgctttccaagatatccgagtgctgcttgtagccaggcagcgtgtgctgatgaaattgaccgttgcgatcccggggcacttgcacttcaattgggccaaattgcgtatcaactttgcggaaataagcaccatttctagagttgccagtattccagccatttctggcatagggatcatagcccagaaaggcagtcaattcagcttctaacaagttattaacagcctgttgtagctctttgcgcaataaatcatttattttgtctggattgaatagagcttgagcaaaatctttggtaaaatcattcatgaaggagttcttctttctgtatgtgtttttttgttcaaaccaatcatacgagaaaggaactcctttttctaatgtttaaagaaataaatttaaggaatcattcatccttacacaaactattttacagtctcacagatatttttttattactaaaatttatatataaatttgattgatcatatataaatttagaatatcaatttgcaacaaaaccgcttacaaactataatgaaattaacatacaatatatattgagaggagaaaaacgaatgacccactactacgaaggctttccacaaagtgaccgcgatgaaaaaatcaagatggtgaatgtggatgaacttgaagaacgtgttaagaaggtaatgccagaaggtgcatattattatattgcttcgggtgcagaaaatgaatggacctggcgtaacaatactgctgcttttaatcattttcaaattgtacctcgtgctttgactgagatggctgatccgcaaactgatactgattttatggggatgcacttaaagacgccaattatgatcgctccaattgcttgtcatggaattgcacataaagatgcggaagtcgcaacgcaaaagggtgctgctatggctggtgcgctctttagttctagtacttatgctaataagagtgtagaagaaattgcagctgcagctccagaagcaccaaggtttttccaactttatttgagtaaagactggaattttaatcagatggtttttgatgcaattaaaaaagctggttatcaaggcattttcttaaccgttgatgctttggtatcaggttatcgtgaagcaaacttgcggactaactttacttatcctgtaccattggacttctttaagcgttaccttggtgcaaaaggtaaaggtcaaagcgtagctcaaatgtacgcttcttctgcgcaaaagattggtcctgaagatgttaaaagaattaagaaagaatcaggtttgccagtctttgttaaaggtgttatgtgtgctgaagatgcctataaagcaattggagccggtgctgatggaatttacgtaactaatcatggtggtcgtgaagttgatggtgctcctgctaccattgatgttttgccagaaattgcgcaagcagtaaatcatcgggtgccaattatctttgattcaggtgtccgtcgtggctctcatatctttaaagctttggctttgggtgctgacattgttggaatcggttgcccatatctttatggtttagccttaggtggtgcgcatggagttgcttcagttattgaacaattaaatgatgaattaaagattgatatgcaattaacgggatgcaagacaattgatgatgttaagcatgctaaattgacgcacattgcttatactgctgataatttgccatctaatactgatccaagcagacgcaaggaatatccggtaactgacgaaaatcaagttaagcaaactgatgcggtatctggtgcttctaagttagaaggaaagccagctccggaaccagagactgataccacaactggtgcttcagtaagataaagcaaaaatataattaatattttcaatatgattgtcattgaataaatgatagtcatatttttttactatcaagaactcagcggctacaatcaaggtgaaagcgattcgatttttggagaggaaaattaaattattgaagagaataatgttttgactgatactgaagagcttaaaatcttgagtgatcttgttgcaataaaatccgttaatgataatgaaattttagtagcaaaatatttacaaaaactattaggagaacatggaattagttcacgtttgttggaatattccacaactcgcgcagatttatttgctgaaatcggaacaggccatcccattttagcaatttgtggtcacatggatgttgtttcaccaggtgaattagatcaatggcatactgatccctttaaattaaccaataaggatggtaaattgtacggccgcggagcgactgatatgaagtctggtttagctgccttggttattgccatgattaatattcatgaacaccatttaattaagcatggtagtatcaggctgctagctacttttggttggtgaaccttctggctacagtattgccattgctcataagggttcgatggatactaagttaacttcccaaggcaaggaagctcatagctcaatgcctgaaaagggttataatgcgatcgatccattaatggatttattagttaaggccaacaaggcttttagagaaacagataaaaacaatccagacttaggtaagttgacgttcaatactactgtttttactggcggggaacaggtcaacatgattcccggagaggctaccgcgcaaattaatgtgcggactattcctgagttcaataatagtttggttgaaaagaaattaactgaattagttaaggcagaaaatgcgcaaggagctaaaatcaaaatgtacatctatatgtcggaaccttcaattaaaactgacggtaagtctgaatttgtaaaattagcccaaaaaattggagcaaaatatgcggaaaagccgattccaacagttgctattaaaccagtaactgatgcttcgaatttgattgccgacaaaggacctagctatccgtttgccatgtttggtcccggtaatgacacgccgcaccaagttaacgaatatgttgatgaaaagatgtatttgaactttgtgaagatctatactgaattgtttgtggcctatttgaataaataatttggaaagtaataaagagcctaggcaaaattttagcctagacttttttattgtattttgaagtattctttagccgcatcactcatccgttcaggggtccaaacaggataccagacaaattctacatcaacatttttaacttcagggacttttttaacggctgttgtaatctgcttgatcaaataatcagtcaaaggacaggcaggtgtagttaatgtcatattgatgagacagatcccatcttgatcgaggtcaatttcataaatcagccccaagttgaccacatcgacgtttaattctgggtcaataacttgagctaaatgttcaataatatcgtttttaattgttttgctatcacgcattgtgttacctacgcatctttaccaaaaatttttgctttaattgcttgacctgttggtgtaccagctaaaccgccgattccagtttcacgcagagatgccggcatttgatgaccaactttcttcattgcttcaatacattcatcagctgggattacacttgtacatcccgctagcgccatatcagctgcgataagtgcattaccagcgccaataccatttcttttgacgcagggaacttcaaccaaaccggcaatcggatcacagactaacccaagcaagttagacatcgcaatcgataaagcttgggcactttgttcagcactgccaccagctacttcaactgccgcggcagcacccatggctgaggcactaccgacttctgcttgacagccgccagttgcccccgcaatttcggcattattggcaatcaccatgccaaaaccgccagcagtaaaaagaaagcgaatcatttgctcttcgctgagctgtaatcttttttctaataaaaatagaacgccaggtaaagtgccggaagaaccagccgtcggggtagcgcagacaacgcccatcgctgcattgacttcgttagtggctatggcattttcaactgctgccatcattgtatcgcctgaaagtgtgtgtcctttctcgcgatattttttcagcttaattgcttcgccaccagttaagccagtttttgaaaagacaccgtttccagattcacctcttttaacggcagctcgcatagtttgcaagttatatttcatgcgctgccagactttttctcgtggcaagcctgatagttgacattcttgttcaataattaattcagaaataggtttgtgcgttttttctgctgcagcaacaatttccttaatatggttatacataatattgccctatgttataaacaaataatattctcaaattttttatttagttcttgcaataaatcaggatgaagataattttctacatcatattcataaatattatagtttttagtatgaaaaattcgtttgcgactaaagggtgctttttcgtgtaagagcgcggtaagctcttgttcaatgcgaatatttttgtgtggatcaactaaaataataataggtaatgcaccagcaggttgaatctcggtattatgtaagacaattttgcgaatttcaattgcaccaccaccgatagagcatccagccaattccactttctttttatcattagacatatttaaaatagcagtattagggtgaccaattgggctaggaccatcttcttcaacaaaacgtaaatctacgccgcgctggcgtgcaatctcaggtgcctttggtacgcgtagatcgtctgagtcaaagcctaaaatacctgccgcaatagcatagtctgttccatgaccacggtgagtttgggcgaaagagtcgtaataatgaacggtaactttactcggggtaccgccaaaaagtttgtaaccagcgcgtccaatagcgacggctccggccgtatgtgaacttgatggtcccaccattacggggccaataatgtcaaaaacacttttataccgattagtcattttaatccctgctttgtaagttattctgtttttaattataacgaataataaagaagattaagaaagttttttggagactgtaaaatagtttgtgtaaggatggatgattccttaaatttatttctttaaacattagaaaaaggagttcctttctcgtatgattggtttgaacaaaaaaacacatacagaaagaagaactccttcatgaatgattttaccaaagattttgctcaagctctattcaatccagacaaaataaatgatttattgcgcaaagaactacaacaggctgttaataacttgctagaagctgaattgactgcctttctgggctatgatccctatgccagaaatggctggaatactggcaactctagaaatggtgcttatttccgcaaggttgatacgcaattcggacaaatagaaatcaaagttcctagagacagaaacggtgagtttcataaacacactatgccagattataaaaggcatactgatgttttagagcaaactgttatcaagctctattccaagggcgtcacaacccgagaaatcgctgatttgattgagaaaatgtatggcggctattattctccagctatggtttccaatatttctaaagaaatgattcccaaagttgaggcatatcatcagcgacatctgtcagataagttcttctgcgtttatctcgatgccacctatattcctcttaagcgggtcacttatgagcgcgaagcagtttatatcgccatcggtatcaaaccgaatggtcataaagaagtgattgactactgtattgcgcctactgaaaatattgagatttggagcgaaatgctcaaaggcttcaagaggcgcggccttgaacaggtagagctcttcttgtctgacggagtagttggcatgaaagaggctatctgccagtcctatcctaaagcgcattttcaacgctgcttggtacacgtcatgcgtaatatcagtgccaaaatgcgggttgacgatcgaaaaaagcactggatgaattcaagcagattcatactcagtcaaacaaagaaatggctgtacaggtgctgcatgaattctatcaaaactgggaaaaagcctacaaaaacgtagttagagatcttagacaggttgagcctgatctgttaaccttttacaactatccgccagctattagagcttcaatttactcaactaacatgattgaatcctttaacaacaggcttaagcggaaaaccaagcctaaaacagaatttccaactgagcagtcgcttgacacctttattggagttcaggcaatggattacaatgaccgttactttaacaggattcataaaggatttgggcaagttcgagacaccctagaatcctattttgattaaaagataaataaaaaagtcaatcaacgagagagattatttacacaaacttcttgacagtctctaatgtcttaactgttaacttaggaaaatgtcctaattgtagtaagtatgacataatttcctttattggaggttatagttagagtgaataggattgatttaactatgaaatatgatgaacagtacaaagtcattaagtatcttgtagatcacaacggcaataagaaaagagcagccttgaagctaggaatatccgttagacaaataaacaggagaatcaagcagtatcaagctaaaggaaaagcggccttcgttcatgggaacaaagaccgcaaacctgttaattgtctcaccacagaaattaacaatcaaattgtaaccttataccgtactaaatatcaagactgcaatataaaacattttgtacagctgttagatcgctttgaggacattcatgtctcttataccaaagcttacagcctgctcaagcagcaggatattctttcccctaagccttggagaaagactaagcgtgccttagccaaaaagaaatggcataagcagcaccctaagcaaagcaaacaagaagtcagcgctgcagttgatcatcaactagctttggcagatgctcatcctcgccatgaaagatgcaagtacttcggcgaagaaattcagatggatgcttctgtcttagtctggtttggtaagcgtaaggcttacctgcaccttgcaatcgacaacgctactggcattattgttggggcttattttgactgggaagagactttgaatggctactatcacgtctttgagcaaattcttaaggaatatggcattcccctttgctttaagactgataatcggactgtattcaattatgagactgctcaaaccaaagctgcccataaagatgtgctgacacaatttggctatgcctgcaaaactcttggcgtagatctaaaaactactagtgtttctcaagccaaaggcatggttgaaagagctaaccaaaccgtccaaggtcgccttaagccagaactaagattggctggaatcatgacaatcaacgaggcaaataaatacctgcatgatgtgtttgttcctgactttaaccaaaacttcagtcagactagtcgtaaagcctggtatgtttttgaaaaggctcctgatgactgcaaaatcaattataccttggccgttctcactggcagagtgtttgatagcggctcagctatttctttcaaaaacaagctttatcaagcaacagatgaatatggcaaattagtctgcttcatgaaaggaactaaatgtctggtaattgaagccctagatggacaactgctaacgacagtagatgagcatgtatatctgcttaaagaaattcctaagaatgccaaaatatcgccagaagtagaccaagagcctaaaaagaaaaggaccaagaaaaagtggattccaccaatgtcacatccatggaagcgagaatcattcataaagcaacaaaagagagctcataaataccatcaatacgtataaaaatagcggagagcaaattctccgctaataattaaataattttgggacattttcctaaattattgacatatttttatgataattcatttgcaagcgtaagtcctcgtaaattggttttccacctaaaatgtccagaatgtagtaagcaacgaaagtaacaataatcattggcaatacttgctggacagtcccaatcatttcagtcagtagcataattgctgtgaatggtgctttttctattgcaccaaaatatgcggccatggaaatcactaggatatgagggaagtacattggcaaaataatctgcaattttatcataatattggcgcaaattattcccaataatgccccaagaactaggataggcatgaaaataccatcaggtacggaagaatcatatgaaagcattgaaaagacaaaccgaattatcaagaataagatcggtagtaaaagaaagtcccatgatccaaaggctttgacattccaattcaaattgaataaattatcaattaacacatgtgaaccaccgagtaagtgggcattaaatagaccaactggaataattaaaattaaaggaatgatactgtgataggctgcagggatttttttaattttactgaaccatggctttagcgaaagtagtacatattgataaatgtatgccattattcccaaaaagataccaattaaaggtaaagcccagtatgcagtaacaggtaaataatcgttaacgggtaaataaaggaatggtttgtttccaaaggctagaatagtaacgaagtcagctgaaaaagtggcggccaagacggctactactttttgaggtttaaaatcaaaagtaatttcttcgaccaagaaaagtgcaccagctattggcgcgctaaaggcggcagccaatcctgcagccacaccgcattattgtagcgttctcaaattttccttgttagatttaaatactttttctgctaatccttgaccaaccattgcgcccatttcaatacaaggaccttcacgacctagcattaatccaggacagatagctaataagcctccaataaatttccgccaaagaatggaccaccatggcatcttattttcatttaaaagaacagcctcgatttgtggtacccctgagccaattacttgttcaaggtaaggcgcagttattttacctaatgttattgcaataatgaacatcaataagatgtagggtacgatcagtactcgctgggctgccatttgcggataaatttgataaagcaacttcatagtttgatcaataatccagcgaaatgcgctaactataactccagtagttagcccaactgaaattgcttgaaccaaagttttagtcatgttggttgaaaaaaggttttgctaaaatctgttttgcatttttaatcattacatttccccatattacagacgatacatcctttttatcctaacaaaatatagcaaaaaaggcatttatgtttttgatgaatgatcttatttttgtaaaaattgttgttcccaatcatagacattttttatatgcttctttaaagcgttagaggctaacaaaatatcttttttctcaactgcagaaataatatccattatttcctgaaccgaggatttcatacaacgatcattgtctacgatggcataacgcatacgattggtttgagtacgtaaaagatcgatggttcgctgaagcgtgggatttccggtattttcagttaaaaatacatggaatagttcatcaagtttaagataagcttgccaatcatgttttgctaaaatttcttggaattttattccataatcattagccagttgtggatctaaattgggaaaatttttttccaaggcataactctctaatagagaacgtaaatcataattgtcttttaattcagctaatgtaatatggctaacgatttttttgtccttgacgaactagtaagccttcattttccaattgtttgattgcttctctaattggagtacgagacatgttaagtttaatacgcgtttgattttctgataaaagatgacctggcttaaaatgaccagtgtttatttgatctttgataaaaagatatgctttttcttgattattcatttggttctcctaactaagataattttacaacttttttattttttatattatttgcaactaataaaactaaaaacttgtatacaggttatctgtggtaaatcgttgacttacaaaatataagttttactatgtaattgtaagttaaattttgatagaaatgaggaaagaaaaatgactaaaattgcagtacttggtgcaagtggacaaattgctaaattagcagaaaatttatttttggaagataaaaataatgaattaattttatttttacgccatcctaataaattggataaaaaagatatcgatgatcaacgtgaaaggattgtcgtaggggatgcaagtaaattggatgaacttgctccggctattaaaggcgcagatatcgtttatgctaatttagctggttcaaatattgaagatcaagctaagacagttgttaaagctatggatgaagatggtattaagcgtttgatttggatttcctcgttaggagtctatgatgaggtaccaggcaaatttggtgaatggaacaagaatattttaggttcatatttgaccacttatcgtgcagctgctgatcaaattactgctagcgatttggattacacgattattcgtccagcttggttgaccaataaagatgaagttgactatgaaataactgaaggcgcaactaccccatttaaaggaactgaggtctctcgtctaagtgtggctagttatgtaaatgaaatagttaaagaccaaagtaaagacagtcgtggtaatgttggtttaaataaaccaaatacctacggtgataagccagcttggtattaaaacaaaaaaataaagaccagcttcaaactgaaactggtctttattttggcttaattatttttcgaattgtttgccccaagcccatggatcttcgtgccaggtctttaagacatcatattgcgtgctagaaatatgacctgactcattttcctttttgagtaattcagggtaggaaagaagcggagcatatttaacattagctttagcaaagttttcttttgcatccggtaggtagtaggtgaaaattgaagaaacgccaatgacgttgccaccatctttttcagttgctttaactgcatttaaaacggaaccaccagtggtgattaagtcatcaattaaaacgatcttatcatctttactgaaacggccttcgatttggcggcctttgccatgatcctttggcttaggacgaacatagatcattggtaagtgcagtttatctgcaacccatgcggcatggggaataccggcggtagcgacgccaccaataatagtagcctcagggaattctttggcgattaaattagctaaatcaccagcaatcatatcgcgtaattctggatatgaaaccgttaacctaaggtcggtgtaaattggagaaagcatcccacttgcgtaagtgaatggtttgtcaggtgagatagtgataattttttcttgaataagttgactgataatttgatccttatgcattttagttaaactcctttttaattgcttcatatgcagcttctgggtcactggctaaagtaattggccgtccaacaacaatagcgcttgagccccattctttggcttgcgctggtgtggccacgcgagattgatcgtctttagcattgccagcaggccgaattcccggtgtgacatataaaaagtcatcgccaactttttcgtgtaattcttttacttcaagtggtgaacaaataaccccatctgctccagagtgcttagccatttttgctagcgaaagaacttgctctttcattgacagtgcgcaattttgttcatgtgccaatacttcatcagaaatcgaagttaattcggttactgctagtaacttaggcacgcttttgccaacaggtgtacccgcgattaaaccgtctttagctgatttgatcatttgactgccgcctaaagcatgaacggtagtaaaagtaattcctaacttagctaattgtttagccccgttataaacggtattagggatatcatgcaattttagatccaagaaaatcttataaccttgctcagctaagtctttaaccacttggttgccagcgtgatagaataattccataccgactttgataaagacgttttctggtttgcctaatttagacaaaatcttatgcagttgctcttcattgtcaatatctaatgcaacaattacaggtttcatttttcctccacaaaaaaagtctatcttagcgcagagagacaccaaggatagacttttcctagataatttaagtcaatattttgaacttgcggtctctctgtaccgtttaaagtttgatcaaggtgaagtttaacacctcaaaagtaaaaatacaaataaaatttttgcttggaaaaaattataatcacgtgtagaatcatttcttgaaaaaataaagagtgtccgtgagcattcattttggaggaaaattatggttaatacacatgtaaaattaccaggtttagatttgaaaaatccagttatgccagcaagtggaacttttggcttcggcgatgtgcctgcagctaagaagtttgacttaaatgatcttggagcaatggttattaagacaactacgccacatgcaaccacaggtaatccgcaaccacagattgccgttttagatgatggggttttgaattcggttggtcttactaatcctggtgtgaacaaggtgattagtgaaaagttagaaccattgagaaagcaatatccagaattaccgatcgtggctagcgttggcggtgatagtgaagcagattatgttgaagtagcacaaaagctgtcaaattccggcttggttaatgctttagaaattaatgtttcttgtcctaatgtggcccaaggtggaatgagctttggcgtgcatgccgatgtggttgaagaattgactagaaaaattaaagcagttgtcaatattccaatttatgtgaagttaacaccaaatgtgactgatatcactgtaattgctaaagctgccgaaaagggtggtgccgatggcttatcgatgatcaatacattgctagggatgcgaattgacgtgaaaaaacgcagaccactgttaggccataatatgggcggtttatcaggtgaggctgttaagccaatagctattagaatgattagtcaagtgcgtcaaattacttctttgccaattattggcatgggtggcattgcttcggccgaagatgtggtggaatttatgttagcaggtgctaatgccgtagcggttggtactgctcattttaaagatagtattgcttctaagcatattgcagatgccttgccgcaagaacttgaaaaattaggcattgaagatatcaatgaattagttggtcaagtaaaatttaattagagcttgacaaacgtttctaattacagtaactttaaagcaatgaatgtcctttaaaattagtcccgtgaggctagcgaggcaggcttaacttaagtttcgactttactaaagctcctagtctcagttgagattgggagcttttttcatgggcagaattaggaggctataatggcaaaagaaatctgggatgcactagcaatgaagcgtgctttaacccgtattacttacgagatcattgaacaaaataaaggaaccgatgatttggttttggtagggattaaaacgcgaggcgtttacttggctaaacgaattcatgaccgtattcagaaattggaaggcgttgatgtaccagttggtgaattggacattaccttatatcgggatgatcgtcatgatgctagtttaaagcaagatccagttgtcaattctgatcaagttggtgttaatattgatgacaagcatgttgttttgattgatgatgttatctatactggacgaacaatcagagcggcgatggatgctttgatgcacgttggtcgcccaagttcaatcagagtcgcagtgctagttgatcgtggtcaccgtgaattgccaattcgtgctgattttgttggtaaaaatattccaacttctgccgatgaacaggttgctgttaatgtaattgagaaggacggcaaagattcagttgaactgaaggctttaccaaaataaaaagaagatagttaaatatccaaccatttaattgactccagagagggccagaagggttgatttcttttcgtgtacacgggaagactctaggcctggagcaattaaatgcttcaggcttttttgtatagaaagaatagaaaatggaaaatttaaatcttgttaatttaccacattttgtgagtgttgaaaatttggatagtaatgaagtagaagccttaatcaggagagctgagtacttcaaaaaaggcggtgcaacaccacgtttaactaagccagtttatgtaactaatatgttttttgaagattcatctagaacacatacgagctttgaaatggctgaaagaaaactaggtttgacagttattccttttgatccggctcattcgtctgttaataagggtgaaaccttatatgacacttcattaattatgaacgccttaggtgtcaacttagaagtgattcgtcactcacagaatgagtattacaatgatttgattaacttaaaagaacatcaacatttaaatattggtgtgattaacgctggagatggtagcggtcaacatcctagccaatgtatgctcgatatgatgactattcatgaacattttggccactttaaaggcttaaaggttgcaattgttggtgatattactaattctagggttgcaaaaagtgacatggaacttttgactaggttgggcgctgaagtttacttctcaggtccaagttactggtatgataaagaattcgatcaatatggtaagtatgaagaaattgatcaattagtttcaaatatggacgtgatgatgctcttacgggttcaacatgaacgtcatgcaggcgatcctaatgaaaagacttttaatgctaaagcatatcacgaaaaatatggtattaatcagcaacgctatagtgcattgaagcacgacaccatcatcatgcatccgggtccaattaaccatgatgttgaacttagcggtgatttagttgaaagcgataagtgcatgtttgtcagacaaatgcaaaatggtgtgttcatgcgtatggcaatgatcgaggcagtattgcgcggtagacgacttggaggattagaataatggcaacagtaattaagaatggcacagtttatcaaaatggtcgtctaattaaagcagatgttttaattgaagatcaaaagattaaagcaatagggactaacttaacggcagataaagagattgatgcaagtggcaagctagttagtcctggactggttgatgtccacgttcattatcgtgatcccggacaaacttacaaggaagatattaaaaccggtagtgaagccgctgctcatggtggttttactatggtaggggcaatgcctaatgtaacgcctgtacctaatacgcctgagctaatgcaaaaaatggtacaagaaaacaatgaaaaaggtgtggttcatatttttcaatatggaccaatcactaatgatgaaactactgatgtcattcctgattatgcagcattgaaaaaggctggtgcttttgccttaagtaatgatggtcatggagtccaaactgctcaaacgatgtatttggcaatgcaaaaagccaaggaaaataatttgatcattgctactcatgcacaagacgattcgctttttaataaagggatcgtgaatgaaggacctaaagccaaggaattaaacttgccgccagtaactgaattagcagaaacaacgcaaattgctagagacttgcttttagcacaaaaaacgggcgtccattatcatatttgccatgtatcaactaaaactagtgtggaactggttcgaatggctaaggcgcgtggaatcaatgttacctgtgaagtagcgccacaccatattttattaacagatgacgatattcctaaggacaacggttattataagatgaatccgccattgagaaataaggaagatcaagcggcgttactagtgggactactagacggtacaatcgatttaattgcgactgaccatgctcctcatgctcgcaatgaaaaagaaggtggcatgaagggcgcagcatttggtattactggtagtgaaacagcattttctactttatatactaaatttgtcaaagaagaaaaagtcttcaccttggagcagcttttatcatggctctccgataaaccagctaaaacgtttggcttaaaaaatgccggggtacttgaaccaggtaagccagctgatattgcgatttttgacttagaccatgaaactgaattaaaagaagaagactataagtcaaaaggcgttaatacaccatttacgggcgacaaggtgtatggtgaaactgtaatgaccatggttgatggtcaggttgtatacagaagggatgaacaataatgcggtatttaatcctagaagatggtagcatctatgctggcgagggttttggcgctgattgcgaaacagttggtgaagttgtatttacaacagggatgactggttatcaagaagcaattaccgaccaatcttatgccgatcagattttggttttcactaatcctttaattggaaactatggtattaccttggcagattatgagtcacttgagccaaggatcaaaggcgtaatttgtcaccaggttgcccgtcatcctgataattggcgaatgcagacaaccttaccaaagtttttggagcatttgaacattccaggtattcagggaattgacacgcgtgaattagttaaaaaattgagagttcacggtacattacgtggtaagattgcagattcaaaagaaaatgcagaaaaaattgcggcagaattaaagattaagaatgtaactcaaggtgtaattagccgagtatcaaccaagtcaccatatccagttcctggttcgaaacgcaatattgtggttatcgactttggaattaaacacagtattttgcgtgaactagcagaacgtgattgtaattgtattgttttaccatatacagctactgcccaagaagtattaaaccttcatccagatggtgttcttttgagtaacggccctggtgatccagaagaaatggtagaggcaactaaaatggtgcgtgaagtagaaaagcatgttcctttgatgggaatttgtatgggacaccaagtctttgctttagctaatggggctaaaacttacaagatgaaatttgggcaccgcggttttaatcaccctgtacgagagattgcaactggtaatattggttttacttcacaaaaccatggttatgctgtgtctgcagattcaattgacaaggataacttaatgattacccacgttgaagtcaatgatgggacggttgaagggttacgtcataagaaatatcctgcattttcagtgcaatttcaccctgatgcaacaccgggtcctcatgatgaggtttcgttattcgacgactttatgtcaatgattgatcagagaaaggaagaagagcgtcatgcctaaaagaacagatattcataagattatggtgattggctcaggtccaattattattggtcaagctgcagaatttgattattctggtacacaggcatgcttggctctgcgcgaagaaggctatgaagtagttttagttaattccaacccagctacgatcatgactgatacaacaattgcagataaggtgtacattgaacctctgacagttgaatcgatttcacgaattattcgtcaagaatatcctgatgctattttgccaacacttggcggtcaagtgggcttaaacatggctatggaacttgccaaaacaggaattttggatgaattacacatcgagcttctaggtactaagctgcaatctattgaacaagccgaagaccgtgaaaaatttaaggaattatgtaagtcattaggtgaaccagttccaccttctaagacagttaatacagtcgaagatgccttagctttgggagatgagattggctatccgatcattgttcgtcctgcctttacgatgggtggtaccggtggtggtatctgtaataatcatgaagaattagcagagattgccaaaaatggattggaactttcccctgtaactgaatgtttgattgaaaaatcaattgcgggctataaagaagtagaatttgaagtaatgcgcgaccatgatgacaatgcaatgattgtctgctgcatggaaaactttgatccggtagggattcacactggtgattcaattgtcttttcaccaagtcaaactttatctgataaggaatatcagatgcttcgtgattgttcactgcgtttgattagggctttgaaaattgaagggggatgcaacgttcaacttgctcttgacccaaatagctttaattatgatgtaattgaagtaaatccgcgtgtttcaagatcatctgctttagcttctaaggcaactggttatccaattgctaagatggctgctaaaattgcagtaggaatgactttggatgaaattaagaacccagtaacgggaacaacctatgcagaatttgaacctgcattagactatgtagtctgcaagataccacgctggccatttgataagttccctaaggctgatcgcgttttgggcacccaaatgaaagcaaccggtgaagttatggcaattggccgtactgcagaagaagctatgcaaaaagcggtaagatcactagaaattgatgaaaaagatctttactcaccagaagcacacgtagctagtgatgaccaattagagcaaaaattagtcaaagctcaagatgatcgtctcttctatttagctgaggcatttagacgtggttattcagctgaagatgttcatgaattaacgaagattaatttctactttttagatatcgtgcaacatatggtcgaattggaaaagacacttgaggaaaataaagatgatgttgatgtattgcgcttagctaagaaatatggctttagtgatccaacgattgcctctttgtggaatgaaactgcagatgaggtaagagcatttcgggaaaagcatggcatcatcccagtctacaagatggttgatacatgtgctgctgagtttgaatcaaagacaccatacttttattcaacttatgatgctgaaaatgaatcacataagactggtaagaagtcggtgatcgttattggctcaggtccaatcagaatcggtcaaggtgttgaattcgattatgcgactgttcactgtgtcaaggccttgcaaaagatgggctacgaagcaattgttatcaattctaatcctgaaactgtttcaactgacttctctatctcagataaattatactttgaaccattaactttggaagatgtcttgaatgtctgcgacttggaaaagccagaaggcgtgattgttcaatttggtggtcaaacctcaatcaatttggctcatggcttagaagaacatggagtcaagattttaggcactaaagtagctgatgttaaccgtgcagaagaccgtgaactgtttgatcaaatcattaagcaacttcatttgaatcagcctcaaggtttaactgcaactactcatgaaggcgtacttgaagctgctgataagctaggctatccagttttagtccgtccaagttatgttttgggtggtaaggcgatggaaattgtctacaccaaggcagagttagaagaatacttgcaagaccacgttgatattgcagcagaccacccaatcttggttgatgattatcttgatggtcgtgaatgtgatgttgatgcaattagtgatggtaaggaagttcttttgccaggaatcatggaacatattgagcatgccggtgtccactctggtgactcaatggctgtttatccaccacaaaccttctctgatgaagttaaagaaaagattactgatgtcactagaaagcttgctttgacgttgaactgtgtcggcattatgaacattcaattcattgtcagagatggtgaagtttacgtaattgaagttaaccctcgggcaagtagaacagtgccatttttaagcaagatcacgggtattgaaatggctcaggtcgctacccgagtaattatgggcgaaagtttggctgaacagggctacggtgatggtcttgccccagagccagacatgatctctgttaaagcaccagtcttctccttcagcaaattatcggacgttgatgcatatcttgggccagaaatgaaatcgacaggtgaagtaatggggagtgatcacacttttgccaaagctctctacaaagcttttgcaggtgctaagatgcaattgcctgaaaatggtaatgtattacttaccatcgaagatcgagacaaagaaaagattttaccaattgccaagagatttgcgcggattggctacagaatctttgctactaagggtacagctgatttcttgcgcagtcatgatttgcatgttgatccagtaactaaagtgcatgaagatgaagacgccaaggataatatcttgaatgaattaagaaatggcaagattgacttggttatcaatacgatggggcacgatattgaaaagaattctgatggcttcatcattagacaggttgccattggtcaaaatgtaccattgattacagcacttgatactgcagatgctttgcttactagcttggagaatagatcatttgctactgatgctttgaagtaggatggttgaatagataaaaataatgcatttctctattgaagtaggagaatgcattattttttatgcaaaaaataattttcacaagtgaactaataattctgagataaataagcgatagatagcattcaatcaagatattgtgaaaaaatatgtatcacaaactttagtatagagccatgagtaagagtatttcactatcttttgtaagcgaatacatttataatctgagataaggaagtgaagtgtttagggggaaataaaaatgtggatttcgtttttattggctttaattccaattatttggcttatttactctttggcaattcgaaaaatgcctgctattaaagcatgcagcattggactattaattactatagtattggctatactgggatttaacctctctatagttgacactttgacgggtgctttagagggcattctgatggggctatggccaattgtttatgtaatcgtggctgcactgtttacttataatgtaagcaattattcaggtggaattaaaattattcaagatactttgtcgtcaatcactactgatcagcgtattttagttttgattatcgcatggggatttggcggattcttagaagcaattgcaggttttgggacagcagttgcaattcccgctgggatattaattggatttggtcttaatccgattaatgccgccgtaatttgtttaattgctaatactacaccaactgcctttggtgcaattggattaccagtgattacactgagtgacgtaactaatttgcccgttactccattatcatttgttattactttacaacttgcattattaattattatacgcgtggtgctagttaaatcgttctagacaataagccaaattataagctaaaattgcaatttccaaccggctttgaaagcctatcagactacgtgctcgattgttctcggcattgtaataggtcagaagcgaaaagtcgctttcaattgttctgcgaatagccatcaattgatgatcattgtgctttttagctcctgtcatatttttacgatatggtgtccaaagttcgtaacccatttgttttagctgttgatgcagttctttgcctaaatagccttcgtcgccaagaagatagtaattagatggatgggtattttctatcagttcaactgtctccctggcatcatgaactgatgcctttgttacgacataatcaagaatgtaaccgtcatcgctaacaatggcatgaactttgaaaccatagaagtaaattttcttggtggccttataaccaatgttggcataaccgcgaaaaattttagcacgatagtttcgaattggttggcaaacaggtaccggaaagctgtcaatgatcaagaactgtccattcaggtcaacctttttattcatttcttgccgtatctgataaatcaattgcaatagctgacgtgaacgccgattaaaacgtgagtgtgataaacaattgaaacattcacagaatcttctttgtgattcaattcctgtcttagcttgccagataagtaaagccaaaatcagactgtccgtagttttaatttgatcaatatttcgccgatgagtaaactcagccggtgcatacaaacgataccagtgccgacaaattatcactaaatctttaaaactaacttgtaaatggtggctaaaacgcttaagcttaaggcagttcaatcagatcagactcttttttattattactatttacaagtcgagtctaacaagattggacttttttattaactaaaacgatttaactagcaccacgcgtattcctatatggaataggctttgccgtaggatttttataaaaataatttaaataactcttggtgttctgatatatattgatttgcacttgtcatccattaatagtaaatcgcttgcattaaaagcgctttcgttgatagaatgctttttgtaacttttttacattaataagggagacaaaacgaatgagttatttatttctgtttattccggcaataggatggggtcttatgcccatgtttgttgctggtgtcaagaagagtaacgtttaccaccaaattttaggtaccgttcttggtgcatttatctttggtgctgcagttactctcattaagcgtccatcttttaatgcgactacttttattttagcaatgttagctggtgctgcttgggttattggtcaagttggtcagtattacagttattccaaggttggggtttctgaaactatgccaatttcaactggtttgcagttgatcggtgtgccacttgtaggtgtgttgatctttggtgaatgggcaagcactcaagctaaattgtttggatttttagggatcttagctttagttattggtgtagcatttacatcattgactgacaaaggtacatctgaaggtggaaaaaagaatcagaccactacaatgattgtgctggtattgactacacttggttacattacttcaagttccattccaaaggccttgaagggtgacagcataatgattttctttgctgaaaccattggaatgttggttgcagcaattgtttatttaattgcaactaagcaaacacaagtctttaaggaaaaagaaagttatcaagtaattcctgccggtgtgatttacgcaattgctgctcttgcatacattgtttcagttaagatgaacggtgtaaacctagcctttgttatgtcacaactttgtgttgttatttctactcttggtggtatccttttcttacacgaaaagaagacacaaaagggtcttgtctatactgtgatcggtttaatattaattgttgccggtgcagttttgacctcagtattttaatgaattttaaataaatattgaatgaactccaacatgataattgttggagtttttgagtaaaaaaattcatgaataaatataaaatgaattaaaatataagtagaagccaaagagaggatgatttctatgagtgataatacagtatacgtgatcgacggtcgtcggtatgcacgtaatggagaaattgtcgaacataatgtgcatgtttatagttcttatcaaaatctgattgctgcatttaagccatttttggaagtttcaaataaagaagtgcatatgaatggcaaaaatgagatgcttcaggttagaatatatgatccatcaaatcaatttttgacaaaatataaatttcccggatttaaaattgaagtgcaacactaagtgttaaacaaaaaggccatgaagacctaaacttgaagtgacgaaaaatcaagaaaggaagatcttcatgaccaattcaaattctagcatttctaagcactatcatcaattaaccagcgtacaacgtggacaaattcaagcaatgctggattccggcataacttcccgtactgttatcgctcaagaagttggctgccataagtcgacaatcagtcgcgaaatcaaacgcggaagcgtcctgcaaagagacagcagctatttattgtatgagcactattacgctgatactgcacagatttattatgagaagcgtcgcaaaaactgctatcagcgcaatccattgaagcattatgctgtctttttgagaatgctctccagacgctttaaagctaaatttgatgccaccagcatcgatgagttcgttggtgaattcaaaaggactatgccaggctacccttgtcccagcacaccaaccgtctatcgctatattgatcagggcttgctggacataagcaatattgatctgcctatgaagctcaaaagacgcaggaacaagcgtcatcacagccatggcggtcacgctttgcacaagaagcatcttggcaattccattgaacagcgtcctaaggaggttgaagacagaaaagctccgctgcactgggaaggagatctggttaaaggcgtcagacgcaagaatcagcctgctttaatgactttgactgaaagaaccacacgctttgaagtagttatcaagattcctgactatcgggcaagcacatgccaaaggctgcttcaaaaggagattgacagacatcctgcctggtttaaatcaatcacgtttgacaatggctctgagtttgcggatatgaccaagatcaagggctgccagatttactttgctcacccatattctccatgggaaaggggcaccaatgagaactgcaatggtcttttgcgtcaattcttccctaagggcaagagcatgaaagacaagtcaaaagcttatgttcaacaggcaactgatgccattaaccacaaatatcgccgaatcctccaatatcacacagcagaggaactcttcaagcaatatatctcttcataacctaactgttgcacttaatttgacaattcaggcaaaatataaatttgatatttatgaaaagaaaatagataatttctttccaagtactactgaacatatttaggagactgtaaaatagtttgtgtaaggatgaatatttccttaattttatttccctgaatattagaaaaaggaatccttttcccgtatgattgatttgaacgaaaaacatactagaaaagagattccttcatgaatgattttaccaaaaatatgacacaagctctattcaatcaagacaaaataaacgatttattgcgtaaagaactccaacaagcagttaatgatctattagaagctgaattaaccgcatttttaggttatgatccttatgatagagctggttggaataccggtaattctcgcaatggtgcttatttccgtaaagttgatacacaatttggcgagattgaaattcaggtgcctagggaccgcaacggcatgtttcatcagcacacgctgcctgactacaagcagcactcggatatcttggaaagcatgattatcaagctttactccaagggcgtgaccaccagggaaatagccgatctaattgaaaagatgtatggcagccattacagtccagctcaggtatcaaatatttccaagcagatgattccaaaggttgaggcttaccacaaacgcaagctaagcgacaagtttttctgcgtctatttggatgcgacataccttcctttgcgccgagaaacatttgagcgtgaagcagtctatattgccattggcatcaagcctaatgggcacaaggaggtcattgactactgcattgcgcctagcgagaacattgaagtctggacagatatgcttcaaaacatgaaatcccgaggcttaaagcaagttgagctttttctttctgatggtgttgttggcatgaaaacagccttggccaggacttatcctaaagctcattttcaacgctgtttggttcatgtcatgcgcaatatctgcgctaaagtacgcgtcgacgatcgtgaaaagatcatgaacgaattcaaacaggtgcatcaacagacaaacaaagaagaagccacagctgtcctgcatgacttctataccaaatggggcaaggtttacagccatgttatcagaagcttgaaagacatagaaccagatctgctggtcttttataactatcccaagcagatcagagcttcaatttattcgactaacatgattgaatcatttaacaatgtgatcaatcgcaaagctaagcctaaagcagagtttccaaatgaacagtcgcttgatacttttattggcattcaagcaatgagctacaacgaacgctatttcaatcgaatccacaaaggctttggtcaggttcaggataccttagaatcctactttgattaaataaaagattaaaaaatcaatctacgagaaaaatctatttacacaaaagatttgacagtttcatatttagcaaaggaatgatccgatgacttttaacaaagaagaaaaagagcaagctttaaagcggctaactgatgaggaatataacgtaactcaaaaggccgctacagaatatccttttaccggaaaatatgatgatttttatgaaaaggggatttacgttgatgtagtgtcaggtgagccacttttttcaagcttagataagtataatgcaggctgtggttggcctagttttactaagccaattaagaaattaacttaccaccgcgatcaatcgcacggaatggagagaacagaagttaaaagtcccgaagctgattctcacttaggtcatgtttttactgacggcccagtggatcaaggtggtttacgttactgcattaattccgcagcattgagatttattccatatgatcagttggaacaggctggctatggtgaatataagaaaatatttgaataaaaaatacggcagatacttaaaataaatatctgccgtattagtttatatattaaaaattatttctcatagaacttaatttcagtattggccaaatcaactgtataagtttcttcttcaagtggtcgtttagtcattccttcatcagttgagtagatgatcaaggccaacttactaccagatggaagagtgtagtaggtaggttgaagcaagaagtctaaatcgtagaacttgtcagcatcaatcttctcaggtcttttcatgtccttatagttttgtaagttcatgtgagccttagtgatcaacttagccttagtcttcttgtccggcacaaattcttgcaaagtatcagtgccaaatctatagccaagttcttgaccgccgcgcattaagaacttaggtgtagcggttaagcgtcttctttctcccaattcaactaaagcaacagaaatttgtcccttaggtaagctgcctttaactctaacttttacttcaggacgaccgacaatcgtagttgggtgaataaattcgtctgtttcaaaacgcaaacttggtttagcccatttttcatcaccacagatgaacttgtatagccagtcgctttctgagatgtcagccttcttaaattcaatgccaccttcatcgacaaatgattgttgtgctttgccattgccatcttggaaaagctcgccgtcatcagttgggtagtaggttttcttttgacctaattcatttgaccaatccttttcttcgtgccacttgtcagcttgcaagttgtcctggatcatgacggttggccattgcttgtaagcattgttttcaatccctagtaattcatgtacaaaccaaaggttcatcaagtcagtaaaatcaatagaaacaaagttgttcatattgtagtgaggaccttggtgtaggaaaagataatgcttcattggcatttttttgactagttgccaaattttataaacattctttggcttaacgttccagtcatttaaaccgtgaacagaaatccaagaacatttgatgccgtcagcgtgatggcggtagtttcttgcttcccaaaagttggaatattgaccggtttcacggtcttcttttgttaaaagctctttttgcatcttgtcgtattccggtttgatcttcaagtaagaacctgcatcccacaagtttgattgacaagtttcagccagtaaatcaaggtcttcaccttggcaggcttcgggtgcgattaccaaaccgtgttcacggtaatagtcataccaagaagaaatagcagcttcagaaaccacagttttcaaacctttaaccccagtagtggcaatagcaatttgcaaagtgcctaaatatgaacgaccagtcatcccgatattgccattgcaccagtcagctttggtttgaacagatctagtacggtcagtgtaagcaatacgatcgccgtggagccattcgataactgcagcagctgattcagtttcttcaggtgcaccagtaatacgaatcccatcactaccacgggtaccgattgctccagcaaaaacactggcaaaaccacgagcaagcatatactcatttaatggataagaagatttatgtactgcttcttcggtagctgggtggttagagtcgtctggctgctttgctttaactattggtgaatgaacatattgtggatcattccaatcggcggcatcagataaattttcatcaacattatggttacgcttttcattagcgataattccgccgaaatatggtgaagcagtataaagggcaggcacttttaagcctttgttagtttcagctggtcggaaaacagtaacttgaatcaagtcactcttaccatcatgatcagtatcaagatcagtttcaacgtaaacaacttcacgaattactttgttggtatcgaagacaggaatagctttgccattgaaaaatttaaacttattttgtccccagaattgagtaaagtaccccttaccagccattacatcgagcaaaatttgaccgtttttggcgcgagtattgagcaaacgataaaaagcagagattaactttttgacatcagaaatgtcttggacaaaaggtaaagcattcttttgcataaagccggttggatcggctaattcgtagtcataatgaacatgatagccaagtaattgtaaggctacattatagaattgagcagtaccaattgattcaggctttccttttaaaaagtcagctaaagtttgctcatttgaaacagcaaattcagataattttgttgtcttagcagcgtcagtttttgcttcagcaattgtcattttaacgagcttgcccagcaaatcgttaaaattccagtctgcataatttttaggtaagaaattgatgtcgattaattcttttacttgttgatcgaagtcagtttcgacataagcgtattggttatatttcatatttttctcctttgcagtttaattactttctattttacttttaattgtggctataaccaatagatatggaagttaataagcgaaaaatatttttattttggtattcttttctttaaaatggacttaaacaaatcggtgatgctaaatgagaaaaaagttttcacttgtcttgctacttacaacgatatttacaatttcgctgacagcttgtactaatcagaataaggttgatcatactaaaagtcagactaaaatcacctcaacaccgacattatttttccacggtggtggttcgtcatatcatgctgaagaacacatggtggcagcagctgagaaagctggagtcacgaactcagtgattagagctgaggtggcgcctaacggtaaggtttctttgagtggaagttggaaaaaaggtgccaaaaatccaattgtagaagtcaattatgaaaataaccgtgagttgaacttttctcgacatggtgtttacgccactaatgtagtgaaggctctgcaaaagcgttatggtattaaaaaatgagcatgttcggtcattctttaggaaatatttcgatcatttattatatgctgcaaaatggacgtaaccggaagatgccacaattagtcaagcaagtcgacatggcagaacattttgctggtttgaactttagccgtgttcccgcctcaattcgtcaacctaaaggtttaaaattgaattctgccggaaaaccgaacaaaatgaatgctagctatcggaaaatgacgggtgtaagagaaacatatccgaaaaataaagttcgtgttttaaacatcattggagatattggtggtcaaaccgatggaacagtacccaatgtatcatctttgtcattaaagtatttagtggcagatcgtgctaaaagctatcaggtagtgaagtttactggaaaaaatgcacgtcactccaagttgcatgagaatccaaaagtagataaagtattaatcaaattcctgtggaataaataaagttagtaataggcatgcgagcgtatgtctattttttgtgccttttcttaatccaattacttgaattataaaataatgcgtgtataatattcatctaattaataaagaaagggcatggttttatgaagctattaaagactaaaatcttaacaattctgtgtggcttgctaacattgaacggcttagccatgttgttttcaggattgattatccaaatggacgaagttgctgattttgattcagcccaaagtttagcagttgctaattcgactaatgccattattttggcaggaattattatgattttgctttttggggcattgtttttcgatggttgggctaagctcaagaacaggcatgctaagcacgttaagttagtttaatagaatagataagactagctctgaagtgagctggtctttttttgcccaaaattaaagtcttctttaccgtttttttacttttgcatgtgataatgagccaaaattaatcagggggatagttatgggattctggtattattatgttttgccattagtgacggctattttattcgtttggctaggaaaccgagttatggtgactaaaaaatggattagcataattttttactcattagctggagtaggctatttaattgcatcggtttttgctgttttttatatctatgcaacagtagaagaaattttaacgccagatattttaacaaaaataggttggcattatttttggagtgataattttatttttcttcttaccagcactgttctattaacaattagctattttgtactaaaacgtggtagattacgcagattacggatgaaataggatgctcaaaaatgataagattatttttgaaaaaatagaataatgatggggtgaaaaaatgactttaccatttaaggcagttgctgtagatatggacggcacgtttttagatgatcgtaagcagtttaatcacaaggaatttgatcaaattttgactgaatttgaacaacgaggagtacattttatcgtggcttcagggcgtccttatgttagattgaagcaggactttggcaagtttgccagcagaatggatttcgtaactttgaatggctcgagattaatcatcaagggtcaagaagctggcagttatttgcttaatcgcgatgacgttttaaagctaattcatgatgtacatgtgaaatatggtgaaatggctacgatggtttttggccgagatattgcatatttgcatagcaatgttgaaaaagatgaacgcgactttttggcttactttgctggtaatagcactgtaattaatgactggaatgacttaccagataagatttatcagatcacatttggaatggacagttctaaggctgcagaaattgaacgagattttaattctaagcacgataaccagatttctgcttttgcttccgctacttttgccattgatgttaacacacaaggtgttaataaaggcgccggattaaagcatctcctagaaaagatggggatgacctgattgcctttggcgatgggggtaatgacatcgatatgttgaaatttgccaaatattcttatgcaatggcaaacggtatggacaaggtaaaaaagcaggcgaaatatattgcaccggccaatacggagaacggtgttttcaaagttttgcaaaaatatttagctgaagataaaaaatagcttgtaaaattaaattaatatgatatagttttaattaacttatagaaatagaggaaattgccatatgattcgtttactgaatctctaatatttgatttgttgtttagcaaaatactgtctttgcaccttgtttagtgcacccattttttgcttgcataccaagtattagcagtagatgaattgagggtggttttctttatcgaaatcaacctttatttgttgcactgttaataggatgtgagcatccagaacagtgctttttctttgcgataaatcatgttagagatttttttgctgattatacgtttttgtcaaaaaagaatgaggaaaataatgggtttaagagattatattaaagctaaccgtcagcgggcaatgttagttctgtttttgattacgctaacgcaactgacaactacaatgtacacctacttaactagtccgcagttaaatgcaattgcaagtggtaaattcgaactgtttttggaattaatctttgtacaatttttaattggacaggtctgcaatgtcagttttaattggggaagtttacaaaataccaaacaaacacagacactttttcatcaggtaagacagcgaattatacgacattattatcagcagcctgaagacaaagtctcagagatggaaaatcatttgggaaatgacttgcagttagtgcaagagagttactataatgtttacttctattttgtttgtgacttaatttatattattttaactattggtacgctgtttacctttcattggatattggttgtctatacattattagttactttgcttgcagtagtagtgccgaaattgactgaaaaatataccaatcgagcaactaaagctgtttctatccaaaataagcaatttttgcagttgttagaaaaatggttcaagggtttagatgagctgcgacgctaccagaataaagttgttttgaaaaaggtggtgggacaacagagtcagaaactagagcagagtgaatatcagcgagataaattgctacattatactagcttagtgtctgcgatatttaatatagctggtcgtgttggtgttccatttattgctggaattttgtttttcaatcatcaggtaaatttaggagcgattctgacagcgggatattttgccaatggaattttttatagtgtagatagttgcgtgaacagatatacgcaattaaaatcaacgaaaactttgcgggatgatctggctaaattgcaaaagtgtttaccagaaaaagggtatgattctttaaaacaaatcgctaccgttcaaataaaaagcttgtcagtacaatatccaaatggtgaaagaattacttatcctgactttgaactgaagaatggtgaaaaggttttattgactggtgattcaggtacaggaaaatcaactttattaaaagttttgttagggcaaattaagccaagtacgggtgaagtaatctatttcgataaaacaggaaaaaagatcaaacctgatttacgtcaattaggttatttggcacaggacttattgatctttcctggcagtattcaagaaaatattactatgtttaagcctaagcttaataaaaaaactgtacaagtgattcataagacggtttttgatagtgatcaagcgcgtttgaaaaatgggatagagacacagcttgatccacaacaggaattgctgtctggtggacagaaacaaaaggtagttttaatgcgggcgttgttgcatgagaagccgattctgtacttagatgaagcaactagtgcaattgatcaacaagcaacgacaaaaatcttccaaaacttaatgcaaagtagagcaacaattttggccgttgcacacaatttaaccgtagaacaacgagcattgtttgatcgtgaagttcacttggagggaaaataatgagtagcaaagaattatttaaacttaatccaattaaattctgtctggctatgggactacagattattgcagcagttggcgaagtagttgtagcttatgtgttaactttgcaatttgatgctgccaaaaatagaaacttgagtttatttttaacttggacattaatccagctgtctagctatgtcatggtattcttattctataatttggcgggaatcatttggcaaaagttgattcaaaattacctgcatttaattcggcaagaactaacagatcattattttgccgatagtcaaaagcatgcggttagtgcagtgcaaaatcggatgactaatgatttgaaactgttacataatgactatttagattcgttccgctatatagtagggatgctagccggtattgtcggtgtagcctttagcttggtgacttttcagtggagtttgttagttgcttgtttaatttttgccgcaattcagatttatttacctaaattactggataagccattacaaaaagctactgaaaaggtatcagtagctaatcgaaagtatttgaagactttaggtgattggttaattggcttatcagaagttcgtcgctatttggctagcgataagctttttaagactattgctgaaaattcaggacgcttggaagcagcaaatattgagaaggaaaaagtagatcaggaattagattatctgaatcaattggcttattcattaggagatgtgctaatctttcttttaactggatttttggtagtgaataattgggctgcttttggtttgattgccagcattggcaacttcaatggagcactatttggttctttgcaaggagttgctaattatggtggaagaatgcgagcaacaaagaaattgcgagaagagattcttgtagctagaaagaaaattcagtctgaacataaaagtaatttagaacaagcggttagtttttcaatccataatttagctatcgattttagaaacggtgaggccgtgactttcccagatttccaagttaaagctggagagaaaattttactaacaggtgattcaggtacaggaaaatcaactttactcaaattgattttaggtgaattgcaagccagtcgcggcaagattcaatactttaatcaaaagggtgaaaagattcaacctgatttagctaaaattggctatttgccgcaagatccagtgttattcccagtaacgattgttgaaaatattacgatgttcaattcaaaactgctaaaccgagttaaatcagctattgaaaaagttcaatttgcaggagatattgctaagttttcggctggcattgagactaagattaaccttgatcaattgaatgtttctggtggtcagaggcagaaaattgttttagctagaagcatggtgcaccagagcaagttgattttgattgatgaggcgacaagtgcaattgatcaggcggctacgatgaaaattttgcgtcagttgactaagacggatgcaacgattgtattcattgctcacaactttaatcaagaaatgcatcaattgtttgatcgtgaaattcatttaaagaaataaaaacaagctcataacctcaaagttataggttatgagcttgttttattatagccaaatttgttcgaaaatatcttctttaaaaccgcaagttaaattactgtcatcaacgactaatggccgcttgattaacttaccattttttgacatcatatctgcagcttcttcaatcgtcattgttggcactttttctttcaaattttctctgcggtaatcttgaccgtgtgtattgaagaaatattttagaccacgatcttgatatttggtcatccattttaccaagtcttcttttttcggtggctgttcaactaaatcttgaaattcgtagttgacctgatggtcatccatccacttgcgtgctttacgtgaggtagagcaacgtttataaccataaaatttaatcattattttccgtccttatttttgtaaaaattttctaaaaaattcaatttcttcatcatttgcgatatcagctagctcgtctttttgatcaacaaagaacacatgaccgcgaggattgtcttcatcaccataggacttgcagatggcgtgaacaccgcgaccgagcaagaagccaaagagggtaaattgcatgtcatgcaaaaaatccttgttagccgtgattaaaaaagtcggcaagaaattgtgattgatatatttttcaacgtcgagttgttcatgatacttgttaactgcatttttagtgaagtaggcgctagccatgccatctaaattgcttggggttaacatgaaggaagcagcacaattcaagccgacagccctaaattttaagttcaatggtttgtaagaaaataacttggcataatctggattagtcaaaatagtgacatactgctcagccatttgaccaccggcgctgtcgccaacgataaaaacgttgttgcgatctagacgatattcttcagcgtgctcatcaacccaatgcatgtagcgatcaacatcgtctaattcatcagggaattccgcgttttctggtgcaagacgatagttgggattgatgaaagcaaaaccgcgcttagctaaacccattccataatattggtagatttctttagtaccataaacccaaccaccgccgtgaatattgatgatgacagggaagggagcttcgtgctttttgggtaaataaacatctaaagtatgccacttttcatctggaccataaggcagattatcaagacgttcaacttcagggatgtcgtgaggcaagccactgtcacgtttggtgtcatgctgatatgcaccatctctaaagtcagtaacaaactttttgattttatctttaagttccataattgttctcttttctagtaattatctatgttaactcaattatactttaattgaatttgaaaaaataaaaacttttttgaaaaatcctcttgcattttaattaacgtttccctataatagtctatgttctgttgaggacgtacaaacatacaagatggtctggtagctcagctggatagagcaacagtcttctaaactgtgggtcgtgggttcgaatctcacccggatcataaattaagcctgtaagcattggtcttacaggctttttacataccttaggtatctatgtgctaaattttactacaaagacaatatttttttacatttgatattgtatgatacaaatatatgacaattattaacttaatcttacattattagtgaatcagttgactaaagtttggaacgagcttattctaaaattgatttccaaaaaataggatcgacaagtgtgaacgacaactatttttaacattatcggaggaattaagattgactacaaccaaaaaaatcattgttagattggcatgcgcgactgttcttggtacggcaggggcagcgctgacacaagtaaatagaccacaaactgcagttgtgaacgctgcaactacctctgttgcagcccgcgcacttggagttgatgttgctagttatcaaaacgctgacttgtcaagtcatgcgcaagctggagcacaatttgcaattgttaaagttagcgaaggtacttcctatcgtaaccctaaggcatcaagtcaaatttcaacggctttatcaaataatatgatgccaatggcatatcactttgctacttttagttcaaatgcaagtgctgctgctgcagaagcaaattatgcaattcaaactgcacaagcatttggactacctaagggctcatatattgcttgtgactatgaaacgggctcaggcaataacatttatggtggtaaaacgccaacggctaatgcaattattgcttttatggacactataaaaaatgcaggctataagccacttctttatgctagttcatcagttttacaaaataatattgatactaatagtgtaattgtcaagtatcctaactcattgtgggtcgcttcatacgctatttcaggtagaattgatagtccaaacttcaattacttcccatcaatgaatggcgtttcaatttggcaatttactgataattggaagggattaagcgttgatggaaatattgctgttttaccattatcaattgacggtaatgtaacttccaacaatggcgcaatttcacaagctccagctaccagcaacaccaattctgctagctcaaccaataaaaccactgcttcatctagtcaaacaacctcatcagatagtaacaaaggtgttgcaactgctggttatgtaatgaagaagtcttacatctacaacaagaagggggaccgccaaggtggctactatgcagcttatactaatattactcattatggtgtagtgactcttgataatggtaagactgccttaaacatgggcaatggtcgttacattatggcaagtaatgttttaggtaattcacgtgtacttaagcacaatgcttatgtatataataacaagggaaaccgcgctaactggagagtgcttagaaaaggtacgccaattaagacctatggttcacggatgcgcgttaatggtaaaagttgttaccgaatcggacgtaacatgtacgttaaggcggctaacttttaattaaaaaattgaatttatcaagaaggaattaagcttaaaggtttaattccttttttcatgccgttttttgtataattaaaagtattcaggaaacgcctgaattaattaacttatagggatgaaataaacttgaaaaaaagatttatagcaataatattgatgctactgactttaacgggttgtactataaaaagtactacgcctaagaaggctaagtcgtcagttaaaacggttaaagtcgataaacagcaatctaaggaaaaacaggctaagtatcaagtgatagaccaagtttggcgaattcaacaagatggcgttgatatttatggtcatatatatctaccacagggtttagctggtaagaagaaagcagtaattttggctcacggattggcaggaaattaccgtgatctaaacagttatgctaaatatttagctagtcgtggctatgttgcctatacttttgattttcctggtggagctaagaatggtcaaagtagtggtgtagatcaattaaagatgtcaatttttacagaagaaaagaatctacagctggtattaaatacaattaaaaataggactgatgttgaccgtaaacaagtgtctttgctaggcgagagtcaaggtggagcagttgccgcaatgctcgcaagtaaatatccgcaagaagtaaagtcattgattttgctttaccctgccttttcgatcactgattatgcgaaagcggcttttaaatcagaaaaacaagtgccagacaagctcaacctatttggcttcacaattggtaaggcctattttgaaaacttgttcaagtataacttgttaaaagaagcaactaagtatcatggtccagttttaataatgcatggtacaagtgacatgattattccagattcttattcaattaaggctaataaaaaatttaagcactcgaaattatacttatttaagggtgcaggtcatgattttaaaggtaaatatcatagtcgagcaaatactttaattgataaatttttgcagaaaaatgggaaataaataatgaagaagaaataccttggtttattggctttattaagcctattgagcgtttttgctatttggggtcaaagcgttagagctgatgttgattatgatattgataatgttagagccatagcaagagttaataaagatggttcactgacaatgcatcgaacaattaagtattcatttgatagtgatgctcgtggcgtttattataagcaaaatctggctgtaaaacagaagttgagcaacattcaggttaaggtcgatggacaaaatataaaggccgcaacaacgggcaaaaataatacgtataaattgcaaaagcagggcaattcttataattttaaggtttatcatcgaattaaggaaaatgataaggttaaagttgagtattcttatctaattcaccgggcaattactaattatcttgatacagctgagctgaactttaaaatagttggtaatggttgggatactgacttagatcatgtgcgtgctgaagtgatttttcctggggcagttaaggggctaaaagcttgggctcatgggccactaagtggttacactcaggttttgccaaaagagggcaaaattattatgactgctgatgatgttgcaggagatagtggtgtcgaagtacatgcgatttttccaactacggtaactagtgctaatcagaatattgttaaagaaaataagaaaagagcatttgaaaaacaagaagcagcattagcaaaagaagctaatcagaagcgtcagcgtaagcagatgcttagtataggattgatgatcatttcagtacttgtcggttttgtggtggtaattagaggcttttttattaaaaaagttggggttaagccaaaaatagagcgcgatttagtacataattatgaaattccagatatatcacctactactgcgcaaattttggatgaagctgataaaccaaatgttaaagcatttgcagcttatttgatgcaattagctggtaaaaataaaattaagatcgaaaaatatcaaactaaacatttaaagcggactaattatcgaattactttagtagatgatagtgttttgactgatgacctgttagactttatttttaacaaagttggtgatggtaagtcatttacaacgaaagatttgcgggattatacttctaaaaaattgggtaggcgttttgataaatggtgtgacgggcaatataagcaagttgaggataaggacttgcttgataaaaaatataaaaagcagcgtagcaacttccgaacggggatgctcatgggaatgattgctagctttgcgatctgggtaattagcttaatgatggcaaataatatacccagttttgtgataataattggaatcatgatgatcgtcttagaagttgttgcattcatagtgggcaattctcgtttaagtatttatacccaaaaaggtgcacttaagacagatcaagttcgcggctttaagaaaatgctagacgatattggtcaattcaagatgaaagacgtcggtgatctgattttatgggaagacattatgccgtatgctgtagcgtttggtctatccaaaaaggtattgaagcagcttaagattgaatttgcagatgaattagatgctgcaccagttctgttttatagtggattctatagtagcagtagtgacagttttgagcatagttttgaacgtagcttctcttcagccgtgtctactggttcatcttcagtttctggaagctcaggtggattttcaggtggatcgtctggcggctttggtggtggcagcggcggtggtgctttttagtgagaaatttttatactataattaaaccctgaattgtcaaattaagtgcaacagttaggttatgaagagatatattgcttgaagagttcctctgctgtgtgatattggaggattcggcgatatttgtggttaatggcatcagttgcctgttgaacataagcttttgacttgtctttcatgctcttgcccttagggaagaattgacgcaaaagaccattgcagttctcattggtgcccctttcccatggagaatatgggtgagcaaagtaaatctggcagcccttgatcttggtcatatccgcaaactcagagccattgtcaaacgtgattgatttaaaccaggcaggatgtctgtcaatctccttttgaagcagcctttggcatgtgcttgcccgatagtcaggaatcttgataactacttcaaagcgtgtggttctttcagtcaaagtcattaaagcaggctgattcttgcgtctgacgcctttaaccagatctccttcccagtgcagcggagcttttctgtcttcaacctccttaggacgctgttcaatggaattgccaagatgcttcttgtgcaaagcgtgaccgccatggctgtgatgacgcttgttcctgcgtcttttgagcttcataggcagatcaatattgcttatgtccagcaagccctgatcaatatagcgatagacggttggtgtgctgggacaagggtagcctggcatagtccttttgaattcaccaacgaactcatcgatgctggtggcatcaaatttagctttaaagcgtctggagagcattctcaaaaagacagcataatgcttcaatggattgcgctgatagcagtttttgcgacgcttctcataataaatctgtgcagtatcagcgtaatagtgctcatacaataaatagctgctgtctctttgcaggacgcttccgcgtttgatttcgcgactgattgtcgacttatggcagccaacttcttgagcgataacagtacgggaagttatgccggaatccagcattgcttgaatttgtccacgttgtacgctggttaattgatgatagtgcttagaaatgctagaatttgaattggtcatgaagatcttcctttcttgatttttcgtcacttcaagtttaggtcttcatggcctttttgtttaacacttagtgttgcacttcaattttaaatccgggactataattaaactaaaaaaggagggctaaattatgccatttgtacatattgaattaattaaaggtcgctcagatgagcagattactaacttaatgaaggatgttactgaagcagtgcacaagaatactggtgcgcctaaggaacacattcatgtaattattaacgaattaggtaagcatacttatggccaaggcggcgagtggagagcttaataattaggaattgtagtaaaagacgactcgattgtgagtcgcctttttatatagttaaatagataaacttgtattagagccttaaagctatgtgtgcataaatgaattatttatttagaatcccacgtaatataatgatgttgatgtctagatatttacgaggaggatttgaaatgaatttaaaaaagaaaattgcaatttctgcaactgcactgactgttgctctctctactgcatttccaattgctgctgcgcaaagtcagccggtaaaagcagtaggtattgtattggttcatcgtgttacagcaggtgaaattgctggaggatttgccctagctggagctgcaaagctattgaactttatgcagcgagctgatgaaatggatgctgcacaatataatcgtcgtgcgaataagattaataaaatgcatttgttacgaacaaaccaggtgccgtttttatctataacaaacgtggccaaattttgaataaaaagtcaggttgggttccaatgggcacaatcttgcgtcgaccaaaaggcctttataccattaagggtaaaaagtactattactttggtaaaggattgttcttcccaaagagtgggacagaaccctatagaattcctaaaaagcatataagtacagcaggtgaaaatttcgctaattggttcaattggcttagaactcgataaatagaaaaattaggaagtgtctgggaaaaaactaattctcagacaggaaaaaagaacgatgatttcctaatggatttcatcgttctttttctatactttaagtgccttccttgatattattgaatcaccacaaaacaaaaagaaagaaggcaatcttaatatatcaaaattataccataggtcaaacagctttaacactcaacttagacttcgctattcctcataatcatttggctaataccattagctggtttgtcgattcaattccagaagatgtcttattggggaatactgctaaaaccggtcgtccagcttatcatccagcgatgatgcttaaaatcttgctttttgcttattccagaagagtattttcaggcagaaaaatcgaattaatgctggaagaaaacgtgccgatgatggctttggctgaacaccaacagatttcttaccatactatcaataactttagatccagcaagcatgccaatgagctggttaagaaaagcttcctctactttaccaatttgttagaagccgagggccttatcaatgaaggagcgatctttattgatggcactaaaatcgaagctgacgccaatcgctatacttttgtttggcgcaaggcagttgaaaaatttcatgacaagctcaaaggtcaagcggttgagctttatgatgaattgattgccaaagaagtcgtcaaagcaatggcaaaagagaaagtccagaccagtcaaggtttggcagagctagcacaagaaacggaagccgagattgaaaagctgaccgaagaaattgagcaagaacccaaagcaatccctggcggttcgcctagaaaagcaagaagacgcggtcttaaaaagctgcttcataaactaagaaaagactatgttcctcgaatgaagaaatatgaagaggcgaaagaaatctttgcagggcgtaacagctattctaagacagatcatgacgcgactttcatgcatatgaaggaagatcacatgaagaacggccagctcaagccaggctacaatattcaagccgccaccactgatcaatatgtggttgactttgctttataccctaatccaactgatttcagaactttcgaaccatttttaaagcagatgacgacactagacaagtttgacaagattgtcgctgatgctggttatggcagcgaatataattattcaatgttagaagaagagtattcagacaagaagtactatattccttataccatgtacgaaaaggaaaagaccagaaagtatcgcaacgatccaactaagctggctaactggttctatgatgaaaaagatgattattaccttgatcaaaatggcgtcagattcaacttcaaatattatagtcaacgtaaagatcgatcgactggtcaggttcgtgattttaaggtctatgaagcagatgaatttcaactaacgccagaattagaacgcttagccaagactaagagcggacgccaacgtcaggttcgctataatcctaactggcaatacctaaaagaaaaagccaaagcagttctccaaagtcctgaaggcagacacatctacagcatgaggaaatatgatgtggagccgatttttggacatttgaagaacgtctttggcatgcgccgaactcatttaagaggcaaaaagaaggttgaaacagatataggaatagccttcatgatgatgaatttaagcaaatattggaacagaagatggtcaaaagaccaattttctttgttcaaaaataaaaatagacagaaaaagacggtcaagcaactcaaattaagagttggattgatcgtctttcagtatctaagggttagttttttcccagacactttttgcgtaaaaaaatttaatcactaaaacgatcaatcaattaacactacttcataaaaattagtataattatgttcgttactattagtaagttatacaataaaagtggtgagaataatgtatgattatcgaaataatatcaaaataattttaaataaaactgaggctgatgataaaagtctcgaaaatagtttaagtgcgattaaagctatcctaaatatggccgaagataatacagctgaaaaatctgagactaaatcagtaactcaacctaagaataaaattgcaaatacacaatcaattgcacaaagaaatgcagatttaaagcaatttaagcaattattgattgggctgacagccttaattgagaccccaggtgatgaaaaagctaaaaagagttcacttgatgctttacacaagttgacgtttgttccaggcgttggcaagcgctatagcaatgttttgggtaaattggatcaggcaattcaaaaatctaagacaactaaagaagctgttaacaagaaaatttttgaagaagcaatgaagcccaaagagcaacctaagcgcgattatcgtaaaggacgccgctatactgttattcgggctttatcaggctgtaatttgattaatgatagtggtcaaattgtttaccgtattaaagaatcacaaattcactctttgaatttaaagagtggtgacatagttgaagctattgaaaatcgagataatccaaattatgaagcagaagtcttgcgcgtggtgggttatcgcaaattgcgcatgcgtgattatgacccaatcgaagaattccggtatgctgtggtccgcggcaaggccaatcaattagctatcactagaaatattaagggcgaaaagttgcgaattcgcggtaaggatatcacgattccggttgattcaagttattatcaaggtgaaaatattcatgttgaagatggttcaattgtagatctagcttggtatacgggtgatgttcgcattaagaaaaatcctgctgaggcagtacagattcgttggatttatcaagttgatccgcctaagaaatcagatctgtcgtatcaaaagaaaaataagtcaaagaaagaagaaacagaagagttaactaaactcgacatgaatttgcactatcagcgggtgggaattgcgattggtgataatcaaaatgaaggaatattagaagggattgtttcgcgctataatgggatcccaattccaatagatgcttttgaaggcaagaagaaggtaatggaacggcaaatcaaagacttagatattgtaatcttgatgacagcttatgctgctcatgatgctacttggaatattcaggaattcgcttcaaagtatggtgttaaatttgccgtttcttcatctaaaggctaccgttcttttgagcgagcattatatcgagctgaaaatgggttacctgcttatgaaggaacgcaatcaatcgattataaagaagttaaaaataaataatttgttaatattattttgtttgcttgagctaacagatgatttttcgttaaaatagtactaactaaaagaaaggacgcttaataatgaaaaacattaaacaacgttcctggatgagatggttggtattcttagcaggacttgaaataatcgcaatatcaatcaatcttttttatggaccgattaatattgcagctggtggctcaacgggtatttctattctagtcgatgcagtatggggaattaatcgatcaattacagtgtttgtagtgaatggcttgatgctgattttggcggcaatctttttaggcaaaaagactacccaaaatattgcattaggtagtttgctcttaccagttttgatggaagttacgcctagctttaaagcagtgaataatgacctactagccgtaatttatggtggtgcattaatgggacttggagtttcgctactttatcgcgttaatgcctcaagtggtgggacaacaattccgccgatgattctgaagaaatatttttatttaaatcctgcaactacacttttatgcattgatatggtaattattttcttgaacatttttgtcgatggttggaatgctttcttcttagcagcattttctcaagtggtaactgccattacgatgcgctatgcggagaccggttttgataaaaagtatcaagtcagaattatgagtaattcagatttagaccgaattcaagatatgcttaaagaagattatcaaggcctgacgatttatgatgttataggtggatatagcgacgaaagcaagcgtcaattattaatcgtagttgatccacgtgaatatgggccacttatttctaaagtacatgagatcgatcaggatgcgtttatcattaccgaaaatgttgcaaaagtgcatggcggtcaatggcgaatgtaaaaaaataattgatcttagtctaaaagcgttgtatgatataagagttgtatttgtggagacctccacatctgcaaccgcacggcttgaggttagaagtcttcttatgtaagaagcaccccagttcggcgagtctaagtatttttttcggaggtgtacaaatgtacgcaattattaagaccggtggtaagcaatacaaagttgcagaaggcgatagcgtatttgtagaaaagcttgatgctgaagaaggtagctcagtaacttttgacgaagttatccttgttgctaatggcgacgacgttaaggttggtactccattagtagatggtgctaaggtaactgctaaagttgaaaagcaaggcaaggaaaagaaagttgtaacttttaagtacaagcctaagaagcactcacacagcaagtatggtcaccgtcaaccttacactaaggttacagttgaaaagattgaagcttaattcagaggtgaaatgaatatgaacattttaggtatgaaattatacgctcaccacaagggtggtggttctactgccaacggtcgtaactcagctggtcgtcgtttaggcgccaaggctggtgacggtcaaactatccacgcaggtactattatttaccgtcaacgtggtactaagattcacccaggcaagaacgtaggtcaaggtggagacgacactttatttgcacttgttaacggcgttgttaaatttgaacgtcttggcaagtacaagaagcaagtttctgtatacccagctgaagaagctaagtaattcagagattaacatgaaaaggcgagtagcataagccacccgtctttttttatggctttttccgcccagaaacatgtataattaaaccaatatcatacaaaaagagggtctctgagatggaaaataggcaagaattattatccttaattaaccagcgaattgagcatgtaactgatttaattaaagaagcaaatgcagatgcattgattatttttaatcaagctaattatcgatatctaaccaattttacaggggaagaagcacaattaattttgactgctagtggcgaacgggtacttttatcagattctcgttttgctggacagattaaagcacaagcacctggcgaaatggatgttgtaatgaaacattctagtgattatgaagaacttactaaggccttgaaaaaaatggacgtcaagagggtcttagttgaaggtgaattcgtttcagcgagtgaatatgaaaaacttaagcaactaaatccagaacttgaatttgtgatggtcgaagaattggttgaacgagtacgtaatattaaagatgatcttgaaattgcggcattgcgcaaagcaattgatatttcaatggaaagctttaaaggtattttgccgatgattaagccgggcgttaaagaacgtgcaattggtgctaaattggactacctatttaaagttaatggcggcgatggccctgatttcgatacaattgtagcttccggtgtgcgttcggcttgggctcatggcgttgctagtgacaaagaattatccgaaggcgatatgattgtcattgactttggtagtttttatcacggttatgcggcagatattactagaactgtttcattaggtgaagttgatgctgaaatgcataaaatctatgatattgtacatgaagcacaacgccgtggcattgccgcggcagttgcaggtaatactggatatgatgttgataaagcagcacgtgattatattacagaacaaggttacggtcagtattttggacacgggatcggtcacggcattggtcttgaaattcacgaattgtgtcaaccagctttaccttttagaactactaaattggtcaataatatggttcatactgtagaaccaggaatctacttgccagacaagggcggtgttagaatcgaagacgatattttggtccatgatcaaacgcctgaaactttatccactttgccaaaggatgaattgatttccctataatagctatttaatttatcgtatttatggtaaaaacgcttcaagattggtaagataataattgtagaaatgagggacttaatatgacaatgatttcagtaaacgaattcaagaatggcttgactattcaatacaacaacgatttatggcgcattgttgaattccaacacgtaaaaccaggtaagggtagtgcctttgtacgttcaaagcttaagagtttgagaactggtgctgtacaagaatatactttccgttcaactgctaaggttgaaactgcagacattcaaactaagtcaatgcaatacttgtacaatgatggctcaagttatgtattcatggatacttctacttacgatcaattagcaattccaaatgaacaaattggcgatgaagctaattacttattggaaaacatgattgttaacgtagttatgcacgaaggtgaaactttaggtatccaattgcctaatacggttgatttgaaggttgctaagactgaacctaacatcaagggtgatacttcatcaggtggtggtaagccagctactatggaaactggtttagtagttaacgtaccattcttcattaacgaaggtgacgttttaactattaacactgctgatggtacttacgtatcacgtgcaaataagtagtttatttgaggtaacaaaatggcagatagttcaaaaattcttttaagtggtgaagaaaacagcgagcaaattaaaattgatccaagtgttctagaagttattttgggtattgctgcagaaaaagttgatggtgttgccggaatgcgcggcagtttgaaatcaggcttaaactgggttttcggtcgtgaagatcatggtaagggcgtaaatattagtgttgatgacgataataagctaattgctgatatttatgtttatcttgaaagcggcgttaacgttcctaaggttgcaatgacgttgcaaaagaagttgaaggcacaattattgcaaatgactgatcttgagctgaaggcaatcaacgttcatgttgtcggtttagttttcccagaagatgaaaatactgaccagactacatcagagctgtttccggaggacgaagaagaaaaataatgaatcaacacgaaagtcgaaaagttgctatgcaagccgtttatttggctaatcaggagccagatttaactgccgaagaagttgaagcaaaagtcgttgcaacgcttaatttaaaacagctttctgcctattctaagaagttaatcgaaggcgtactagaagatcgcaaaaatttacagtctgaactaactagtcatttgaaaaagggctggcgtcttgagcgtgtaagtcaaactgtggtagctatcatggaagtcgctttgtttgaaatcaatcatagtgatgagattgatgctaaggcagcagttaacgaagctttaaatttatgtgacgaatttgctgagcctaaagagaaaccatttattaatgggatgttagcaaactttgttaaatagcgatgaatagccggaagttttgccggttatttttttataaaggagacaaaattaatgggagaaattcttgatggtaaagtatttgcaaatgaattgggacaaaatcttaaagaaaaggttaagaatttaaaagaaaaaggaataacgccacatttttgcgtaataaatattggggatgatcctgctagcaagatctatgtccgtactaaaaaacggcgtgctaaaaaaatgggcatcattcaagatatttatcaaatgcctgctgatactgagcaagcagaagcattggctttgattgataaattaaatgccgatccaacgattaatggagtaatggtacagttaccagctccaaagcaaattgatgcagatgagttactagagagaatagatcctaataaagatgttgatgggttaacgccagctaacattggtcgtttgtggatggaagatcattttattgaaccagctacagctgagggaattattgctctattaaagcactatcaaattaagcttgatggcaaaaatgttgtggttgttgggcgcagtaatattgtaggtaaaccacttgcagctctaatgcttgagcaaaatgcaactgttactatttgtcacttacatactcagaatttaggggaaatcacaaaaaaagctgatatagttgtatctgctactggacaagcatttttgatcactgctgatatggttaaagatggagcagttgttgttgatgtgggcatgaatcatgttaatggtaaattagttggtgatgttgattttgacaatgtaaaagaaaaggctagctacattactcccgttcctggtggggtaggcccacttacagtacaatttttaatggaagcagtagttaaattgactaggagacaaaatggccgagaataaatatttaacggttactgatttaaattattatattacgcaaaaatttaagaatgacccatatttgcacaaagtcttcttacaaggcgagctatctaattttcgctatcgccgtaattcgcaccagtatttttcgttaaaagatgaaaaatcgaagattaatgtagtaatgttccgttcgttctttgaaaaggtgaaatttaagccagaagagggaatgaaagtctatgtggttggctatgttagcgtttatggaccacagggctcgtatcagttttatgctgagcagatggaaccagcaggtcttggagcattatatgagcaattgaagcaattacaagccaaattagctaaagaaggattatttgatcctgctcataaaaagccattaccccattttcctgatcgaattgcagtagttactagtgcttctggggccgttattcatgacatcatggttactgctaatcggcgattcccacatgcagaaattgacctgtatcctgcacaagtacaaggtgatactgcggcagattctttgataagggcgatgcagcaaattgcagcacaaggtgacaagtatgacgtaatgattattggccgtggtggtggttcactagaagatttgtggccatttaatgaggaaaaagttgtgcgtcaagtctatgctatgccaatgccggtaatttcttcggtaggtcatgaaacagacactactttatgtgatttggttgccgacgcacgtgcagcgactccgactgcggctgctgaatatgctacgccaaatacgctggatgaacttgctcatattaagcaattaactagtcaattagttgctagtatgcaaaatattattcggtcaaagcgtgatcgtttaagccgggtgcaaaattctgttatcatgcgagaaccaactaggttatatgaccaacaaattcagcaggttgatcaattaaaacaacgtttgcaaaatagtatgcaaaatcgcgtaacgcattctgcacaaagttatcaattattaaaacagcgtttatttagtgtcagtcctgataaaaaaattaatcagctgcagcagcaaaaacaatttttgcagcagcggatgattgataatatgcagcattatttaaagaataagcgcaatgtttttactcaagtaatgcaacagttagatgattacagtcccttgaagacattagagcgtggctttgtttattcaactaatgagcatggtgaaacaatcagttccgttaaacaagtgcaaaaggatgatcgtttgttattgcattttaaagatggacaagttgatgcggtagttacaaagataaaggaagaacaaaatggcagtaaagaaaaataattttgaagaacagttaactagtttggaacaaattgtacaaaatttggaaaatggtaatgtccctttggaagatgccttgaaggaatttcaagaaggcgtgaagattagtcgtgatttggaaaagaaactcaatagtgcagaagaaactgtagctaagttaattgatagcgatgggacagaacacaagctggatccaaataatgcatcagcaccagaggaataattatgacagcattcacttattttaaagatcaatggacaccaataattgatgattatttagctaagcatttggctagtgaagtgaaagatcagaaaattagccagattatggcttattcagtgatggctggtggcaaacgcttgcgtccattattgtttttagcaacacttaacacattaggtaaaaaaattgaggaacctgaagttcgaattgcctgtggaattgaattgattcacacttattcactgattcatgatgatttgcctgctatggataacgatgattaccgtcgtggcaagttgaccagtcataaaaaatggggtgaagccgaggctattttggccggggatgcgctcttgccaatgggaattcaatggattgctgaaggtagtaattcagctcaattggtagaattaattactaaggcagtgggtccaaacggaatggttggtggacaatatttggatattgattcaaccaataatgctagtgtttctggagacgctaagttcattaacaagatggaatggctaaaaacaggatgcttaattcaagctagtgtcgaaatggctgctatttttgcaaaagctagtgacattgaaaaagtaaaattgattgactttgctaaagtttttggccgatcataccaaatttatgatgacttggttgatgtggttgagactagcgaagaagctggtaaagctacgcacaaggatgaagctgaaggaaagaataatactttaactttgttaggaattgatcaaagtcgcaaagaactaactgacttaattaagcaagcacaagatgatttgcatggactaaatggcgaagtgctaactggctttttagatctttatcaaaaggtgttataaatgacaaaacaaagagcagatattttattagcagaacaaggcctttttcactcccgctcagctgcacaaagagcgattatggcagggctagtttctgatcataatcatcaacgcattgacaaaagtggaactaagtttcctgaaggcgagaagttctatgttaaagatgatggcaaaaagtatgtttcccgtggtggctttaaactggaaaaagcattgaaggtttttaacattgatttgacagataaaatttgtttggatattggtgcatcaaccggtggatttaccgatgttgctttgcaaaatggtgctaagatggtttacgctttggatgttggttataatcagttagcttggcagttgcgggacgatccacgtgtggttgtgatggaaaagcaaaatttccgctattctaaaccagaagattttgaccaaggtttgccagattttgccatgactgatgtatcctttatttcgttggacttgattatgccaccaatgtatgcaattttgaaggatcaatgtgatgcggtttgtttgattaagccacagtttgaagctggtcctgaaaatgtaggcaagcacggtattgttcatgaccatgaagtacataaagcggtaatcgagcatacaatgcgtaaggcattagagacaggctttaatgtcctaggcgttgattattcaccaattaaaggtggcaaaggaaacattgaatttttgatctatttgcaaaaagatgaagcaaatggtggacgcaacttatggcaaggcagtccagctgaagtggttgaacgtgccataagtggcctataggagtgaaattatgctagttgagctggatatcaaaaactttgcaattataaaaagcttaaaagttcgttttcaagaaaaaatgacggtgatcatcggtgaaactggtgcgggtaagtcaattattattgatgcggtttcactattaatgggtggtcgtggtcaaaaagaaatgattcgttcaggtgagcccaagtcaattattaccggcttgtttgaattggataatcaaaaagagaaaattgcggaattatgtgatcaatatggattgccccatgatgatgatcaattagtaattagtcgtgaattagcagtaaaaggcagaaatgtagttcgcattaatggtcaactaactacaattaatgttttacgcgaaataggtaactatttagtcgatattcacggccagcatgatcagcaaattttaatggaccaagatcgtcagattgatttggtggataactatgcccgagattcttttaagacggatttaacaacttatcagaaagattttactgaatggcaaaagttgactagtcaattgcgacatttgcgtcaagatgctcaagaattggcacaaaaacaggatattttgcaatttcaaaataatgaacttgaagcagctgatctagaggatccacaagaggatgaaaagcttgaagaagaatataatgagctgaataattatcaaaaaattgcggatactgccaattatttcatgcaattgtacgatgatgatgagcatggtattgcaactttacttggagatgcgcaaaatgctgcgactgatttaactgaatttggttcaaaatttaaggattttgctaagacagttgatgatggagtttatgctttaaatgacgcccgcagtgaattatcgaacttaatggatgcaatggacttcgatgaggaacgttttcaatacgtgactaaccgcttggataccttgaattcattgaaaaagaagtatggcccaaccttggctgatgtgtttgctttttatcaaaaagtacaaaaagaactcagtcaatttgaaacaggcggccttgatgaggaaaaattgcaagcagaagttgccaagattgaagaaagaatgacccaagaagctagagatctgcatttaatacgcgaaaaagtggctcattctctggaagagcagattaagcaagagttagctgatctctacatggaaaaagctcgcttttctattaattttgatgaaacaaagacatttaccgataagggaactgatgcgattgttttcttaattgcacctaatccaggtgaagatttaatgccattagttaaaattgtttctggtggtgaacaatcaagattgatcttagctttgaaggcaatcttcagccgagttgaaccagtgggtaccatgatttttgacgaaattgatacgggagtttctggccgagtatcggctgctatcgggaaaaagatgcactcaatcggtcgcaacaagcaggtaattgcaattacgcactcaccgcaagtggctgccgcgggtgatcaacgctacttggtagctaagcaagtaaaagatggttcaacctttactcaaataggcccacttagcaaggaagaaaccattacagcgattgcacagatgatggctggacaagatgtaaccgatgcagcaaagaagaatgctgcagatttgattaagagtattaaagatgactagtattagtaaattttggcgtgatttttgtgtagaacatcaagtaagtcctacagcattagaaggtgcttttgcttttggagctaatagccgggatgcagatattcttagtgatttggtcaaaagtggaattaagacggcaacgactagcctgtattctgcgcaagaagatgtaccggttgtagggatgtacgcaattgttttaaatggacgaaatgaaccagtttgtgtgattcaaaataagactgttgagattatgccatttaaaaatgtctcagctgagcatgcctatttagaaggcgagggcgatcgctcatatgaatcttggcgtaaagtacacgagaaattttttgcgcgcgaatgtcaagaactgggacgagagttcacagatgaaactgaagtagtgtgtgagacattcgagaaaataatttagtaaaggagcagacgattttgtctgtttttttgtatgcaaagagaaaacttgaaaaagaaacaattttagtgcaaactagatatattacaagttaagaggagttcagcatggcagataaaggtttattacttgtgctttctggtccttccggcgttggtaaaggaactgttaaaagcgcgattgttgaaaacaaagtctttccatttgaatattcagtttcaatgactacgcgtcaaccgcgaccaggtgaggttaatggccaagattatttttttgttagtgaagatcgctttcaagaggctattaaaaatggtgagttgttagaatataataaatatgtcggtcactattatggtacacctcttgcaccagtgaagaagatgcttcatgatggcaaagatgttttacttgagattgatgttaatggggcacaaaaagtacgtgaaaagatgcccgatggcgtgtttatctttttaaccccaccagatctacatacgttacatttgcgtttggagcaccgtggcaccgagtcagaagatgtaattcgtggtcgaattaagcaagcgcgcaatgaaattttggagatggaagactatgattatgcagtagttaatgatacagtagctaatgcagttgatcatattaaagcgatcgtcgatgcagaacatgtcagtgttaaacgtgtaattgatgactatcgtaagatggtcaaggaggattaattattatgagaattacttacccatcaattgataaattattgtcacgtgttgattcacgctattcattatctgttcttgccgctaagagagcacatgaacttgaagctggtgatccaccaactttggaacattttaagtgtgataaggctgttggtaaggcacttgaagaaattgctgctggtaaagttactgttgacccagctcatgccgaggttaacctcgaagattaatttattgaccttcatcctttggggtgaaggtcttttttacaggtgattaaatgattgctcaggttattgttgatgtagctgcacggcaaacagaccgtatttttgaatatcatattccaacagaattagaaaaggatattgcgattggatcaagagtagttgttccgtttggtcctcgtaaagtgcaaggttttgtggtggggatcactgatcaaagtgaatttaaaggtaaacttaaggatttgctagttgtggtagatgagatgccaccgcttacgccagagttggtaaagttatctgctgatttagcaaaaaatattttttcttaccgaattaaaattttacaagcgatgctaccttgggtaatgcgagcaaattatcgcaaattgctagtgccagctaatgatagagctgccaaaatgccgctgtttcagggtgatccaattgatttaaataaaattacggatctggcggagattaagcaattccgcaaattattgcaagatgatcaagcaaagattgagtatgtggtagaaaatcgagccaagaagaaaaaagaaaatcaatatgaactagcattaaaaaaagaggaatatcccaaaatttacaatactttacgtcaaaatgcggtaaagcaaaaaaagttattgatggatatcattgataatgcagcggattatcccaaaagccaaagccagctagaaaaacagcttggattgacggcggcgagtttgaattctgcgattaccaaaggttggttgaataaaaaaagtgttgaggtttatcgcgatccgttatccggatttgatgacggagaacataaaacagcggttaccttaaatggtgagcagcaaggtgctttgaaccagatcacccaagcaattgaacagcgccaggctgagacttttttgttggaagggattactggtagcgggaagactgaagtgtatttacacgctattagcaaggctcttaaacaggggcgaaatgcattaatgctggtgccagaaatttccttgacgccgcaaatggtttgtcaggttaaggcacgttttggtcaagaggtagccgttttacatagtgccctatctgagggagaaaaatatgatgagtggcgccgaattcgtcgtggcgagactaaggtggtcgttggcgctcggagtgcagtttttgctccactagataatattggtttaatcgtgatcgatgaggaacatgagtcttcatataagcaagaaaccgatccacgttataatgcacgtgatgtggctatttggcgtagtaaatttcataattgtccgttggttttaggaagtgcaacaccatcgttgagtagccgtgcacgcgcccaaaaaaatgtctatcatcttttacggttaactgaaagggctaatcaaaagaaattgcctaaagttaatttgattgatctaaagcacgtgcagtttgctggtggtcaatttgatttatctgttgagctagtagatgcaataaaaaagcgtttggcaaaaaaagagcaggttattttaatgctcaatcgacgtggttttgctaattttatgctttgccgtgaatgtggttttgtattaaaatgtcctaattgtgatgtttctttaaatttgcataaggatactaacagtatgcaatgtcactattgtggtcatactgagccagtacccacacgttgtcctaattgccaaagctcgcaaattcgttttttaggtgcaggtacacagaaggtacaagaagaattagaagagcttctgcctggtgcacgaatcttgcggatggacgttgatacaactagaagaaagggtagctataagaaaattctagatgcctttggtgctcatgaagctgatattttgttaggtacgcaaatgattgctaaaggattagatttccctaatgtaactttagttggagtaatcaatgccgatacaggattatggctttctgactataatgcttctgaaaagacttttgaattattaactcaagtagctggccgtgcaggtcgtgctgataaggaaggggaagtcttaattcaaacttataatccagagcattatgctattcaactagctcaaactcaggactacgaacgattttatggctatgagatgaatatgcggcatgctggtaactatccaccatatttttataccgtgctgatttccattgctgctaaaaaagaacagaatgcagctcgtgaggcttttaggattaagaggtatttgaatgagcacttgcatgtgccaacgattattttgggaccaacgccaagtgcaatttctcgtgtaaaaaataaatattattatcaaatactggtaaaatataaaaaagaaccaaatttaaatgaattattacaccatgttcaagattccgcgcaggaagctaagaaatatggtttaagtatttttattgataatgaaccagagagaattatgtaaggggatgctttaatgacatcaataatatttatgggaacaccgaaattttcagttccagtacttgaagggttaattgatgaaggctatgagattaaagccgtggtcactcaacctgataaaaaggtaggacgtaagcagaaaattactaagtcaccagccaagatcgcagcagaaaagcatgatttgccaatctttcaaccggttaagttgtctggatcagacgaaatgcagaaattaattgatatgcatgcagatttgattgtaactgcagcatatgggcaatttttaccaactaagtttttgaattcggttaaaattgcggcagttaatgttcacggctcacttttgcctaaataccgtggcggtgcaccaattcaatattcactaattaacggtgataaagaaactggaattaccattatggaaatggttaagaagatggatgctggtgatatttatgctcaagaagcaattaagattgagcctgatgataacgctggcactttatttagtaaattatcaattgttgggcgggacttattgcttaagactttaccagcaattattgatggctcaattaaaaaggttccacaggatccagaaaaggtcgtcttttcacctaacatcactaaagaacaagaaaagcttaatgttgatatgacagcagaagaggtcaacgatatgattcgtgctttgaatccagatcctggtgcttatttgatgattgaaggcaaacgtttcaagatctggaaggcagaaattgcatctgattcatcaagtttaaatgccggctctgttgttgctaacaaaggacgttttgccattagttttgctgataattcagtacttaacttacttgaagttcaaccaagtggcaaaaagagaatggacatcaagagctttttaaatggtcaaggtagtaagtttgtcccaggtgaagaaattgtcgatcgataagagtgcacgtgcagtcagcttagagacattgatcaaggtcttagatcaaggctcctattctaatattagtttgaataacagcttaaagcactctaacttgtcaattgcagaccaaaatttagctactaatattgtttatggcacgattcagtatcgattgtttttagaatatcagttaaaaggcttagttaggacaaaactgaccgaaaaatatattaagccattattgttaatgtcactttaccagttgatttttttggataaagtgcctgatcgtgctgtacttgatgaggctaataaacttgctaagcaatatggcaagcgacattcagctggctttcggttggtaaatgggattttgcgttcgtttactaggcgcggggtgattttaccagctgaaaataatccagttaaatatttaagtgtcaaagagagcgtacctgaatggttagttcaatatttaattgataactggggcctagacaaggcaaaatcagttttaaacagtattaatgagccagctaaaaacagtgtacgtatttcaaagttggcagataaagagcaagtttttgcccagttagagcgggataactatcaaccacaatggtctaagttatcaagcgatgatgtgattttgagtcacggtggcattagcgaaagtgatttgtttgaagaaggcaagttaacaattcaagatgaagctgccagtttagtcgtagaagcttttgactttgaacaagatgagcatgtgcttgatgcttgttctgctcccggtgggaaaaccgtgcaaattgccgaaagcattgttaatggtgatgtgactgccttagatattcatgataaaaaattacgtttagtacgagataatgcccagagaatgcacgttgcaaataaggtaaagactaaggcatgtgatgcacgtaaggctacagagatttttgcggcgggtgaatttacaaaaattttagtcgatgccccttgttctgggcttggattattgcgtcgtaagcctgaaattcgctatactaagagacaacaggacttacaaaatttacaaaaaattcaattggcaatcttaactgcagtaagttcactcttaaaaaagaatggcgagttggtttattcaacttgctcaatttcaatggaagaaaatgaagaggtagttaagaagtttttgcaagcacatcctgactttgaactagttccatttaagttaactaaacttgaatcaaagacagggatgttgaaaataatgcctgatctagatggcaatgatggatttttcattgctaaatttaagttacgaggttagatttttgattgaaacagcatacgcttcgagtattggtaaggtacggaaaagcaatcaagattttgtaaaagtttttaaaaatcaaaagggaattgtcttagcaattgtctgtgatggtatgggcggccatcaaggtggtgacgttgcttcaacaatggcagtcacccatttaggacataattttagtatgactgactttgcagatgctaatcttgctcataaatggcttgatgtgcaattaaattctgaaaatgaaacaattttaaagactgctgataagtttcctgacttaaatggaatggggacaacgattgtattggcgtttgcatttgataaaaatgccttaattgctcatttaggtgattctcgggcttatagttattctgaaggtaaatttgtccaattaactgaagatcattctttggttaacgaattagttaagatgggtcagattactaaagaacaagctaaacaccatccccagaaaaatattattacgcaagcattaggcgtctcaagtacgattgatcctgaatttgatgagatcaagatgggggaaaacgacattattttgctctgtactgatggcctaaccaattcacttagcgatccacaaatccaacaaattttggcaactaaggagcttagcttaagagaacgttgtaataaattgattagtgaggccaatcgattaggtggtggtgataatattactgtctgcttaatttggaacaaggaggacgagagcagtgatcgataaaggttatctgcttggggaacgttaccgcatcatcgataccttaggtgaaggcggaatggccaatgtctatctagcggaagatattatcctgcaacgtaaggtggcagttaaaattttacgccttgatttgcagaatgaaccgcaaacccaagctcgttttcaaagagaggcattagctacaagtgaattaagtcatcctaatattgtttctgtacttgatgtaggtaccgatcatggtttgccatacatggtaatggagtatgttgatggtcctaatctaaaagaatatattcaaaaaaattcacctttggatttaaatgaaattattcgaattatggatcagatattgagtgcagttgcattagctcataagcacaatgttattcatcgtgatctaaaaccacagaatattttgatggataagcgcggcaatattaaaatagctgatttcggaattgccgttgctttgaatcaaagctcgattacacaaactaattcagtaatgggttcagttcattatatgtctcctgagcaaacgcgtggcggaatggttactaaacaatctgacatctattccttgggaataattttatatgaattgatcacaggaactgttccgtttaacggtgatacaccagtggcaattgcactgaagcatgcgcaagaaccaattccttcaattcgcaagaaagattcaagtgtaccacaagcgctggaaaatgttgttttaaaggcaaccgcgaaagatccacgagatagatatgctacagctcaggaaatgaaagcagatttggatagtagcttggatcctgaacgggcagatgaaccggtttttgtaccatatcatggtaataacgatgataaaacaattgtattgcccggatttaagccacaaaaggaagaaaaagaagtggtggagccagcaaaaaccgaatcagtagaatcaagcaagccagtaaagaaaaagacttttttacagaatgtcaaaagtcacaaatggtggtggctgatctcaattattgccgcgggtttaatcatttttatgatgattttcgctttaagtggtactggaaataaacgacaggatgttaatattcctgatgtaactaatattgcagaaaaagcagctgagagtaaacttgaagcagcaggcttacaggttggaaaaattattaggcgacaatcagatgatataaaaaaaggccgggttattgcgacaaaaccaactgcaggtaatagtctagagcgaggaaagagcgttgatttaattgtttccagcggttctagcatggttaaagttcctgatatggttgggaagaactatgccgaagcggcagaaaaattagaaaatatgggctttgatgtagttagagaggaccaatattctaataaagttgacgaaaatcaagttatttctcaaagcattgctgcaggtgtagaggttaagccgacgcagactacaattacgttgatagtttcacgtggcaagcaggctagatcacattcaaatatggttaccttgaaagacttaagtaattattctttgaagagtgctcaagactatgccaaagaacatggcctgactttacaaatcaatcaagaatattctgatgatgttgagaagggcttaataatttcgatggagccaggtccgggtactaaggttgagcgtggttcaactgttaccatcaaggtctcgaaaggtccaaaggaagacaaggaaactactgtaactaagacctttaccgttaactatgttggtgatgatctttctaagagtgagaagcctgataatgataaaggaagcaataactctgagtcagaatccgttaatggcaagggtgatcatgtccagatctatattaaggatgatgatcattccttgaacaatatttatcgtgacttgtatattaagcatgatatgagtttctcgattccatttaacattagagaaggtagtggacaattaaaggttgttcgcaatggcgatacagttttgaatgaaaaggtgactaaataaatgaaactagcgcaaggaaccgtcgttggtttgattgctggttattatgatgtagaaaccgctgcgggtatcgtgagaacgcgtgctcgcggcgtttttcgtcaaaaaaagcaaaaaccggcagttggcgatcatgtggaaattcagatagatgataaaggaatgagctatctggtgaaaattttgccgcggattaatcgaattgggcgaccagcagttgctaatgtaagtcatgttttgttagtaatttctgcagtagaaccggatttttctgtagagctgttagatcgttttttgactttcttttcttggcaaaaagttggtgtaacaatttacttgtctaaagcagatttgctatcagaagcaaagttaaacacaatcaagcaagctttagcatattatcaaaaaataggttatcttgttttcactgattatcatgaaatgcaaattcagattcctaaaatgatcgaaaaaaatcaaatttggactttagcaggacagtcaggtgctggtaagtcaactttgcttaaccatttaaaaaaagatgctaatcaagcgactggtgcgatatcaactagcttgaatcgtgggaaacatactactagaaaggtcgaactttttaagttaggcgcgggctttttagcagatacgccaggtttttcgtcaattgatttgacaccaatcaagttgaatgagttatgtaattactttgttgagtttaaaaaggcaagtattcactgtaagttccgcggatgtcagcatttgcaggagccaggctgtgaagtaaagaagttacttgaagccggagaaattctggaaagtagatatgaagattattttgctatgcggactgagattagcgaaggtcgcataccggaatatttaaaatagaggtaatagctgatgatgattgcaccctcaattttgaacgcaaataatattgatcttaaaaatgatattgaaaatgcagtccaggccggaattagccgttttcatattgatattatggatggacattttgtgcctaatttatcttttggaccgcaactaatcaaagatttcaagcgtgaatttccgatgacagatgctgaaattcacttaatgagtgatgccccagataagttggtaccagcttttgttagtgcaggagcagatttggtcgaactacactatgaagcaatggacaagcctaagttatattattggttcgattatttagcttctaatggcgttgatgctgctttggcaattagtccagatacaccagttgaagtggttgaaccgtatttgccattactgaaacaagtattagtaatgacggtcaagccgggatttggtggacagagttttcttcctgaatcagttagtcgaattaagtcagttagagagattgtcggctctgattttgatattgaggtcgacggcggtattaatgatcagactattaaattagctgaaaatgctggcgctaatatatttgttgttggttcatacttgtatgaaaatggtgatgttggcagtcaagtacataaattagaaaagattattaagtaatgaaagcatatgcattgttgggcggtccaactgaattgtggcctgaagatattgaagaaaagctggctcaagctgatttagttattggggttgatcgtggtgccttgtttttagaagaactgggaataatacctgatgtggcagtaggtgactttgattctttacacgaaaatgacttaagccaaatagaaagtaatgttcaagacattcgctattctaatcctgtcaaggattggactgattctgagctaatgttgcagattgcttttgaagattatcatgtggatgaattagtgatttttggtgctacaggtggaagattggatcattttttgatcaatctattaatgttgctaaatcctgaaatgagattatatgcgaaaaaagtaacgttgattgaccaacaaaatctaatttgcttttttaatgcaggcacgcatgttgttcaaaaaagaaaaaattattcttatattggttttgcagctttaacagcaatcaaagattttaatattattggtgcaagatatgagttgaagcactattctgggaactatcctcgtgttttttcatcaaatgaatttttgcctaatagtaatgaattcaggattagcttgcaaaatggtatgattgcagcaatttattctaaagatattaatcgttttcatgatttataggttaaaacagaactatagaaaagaaacaagggaattcaaatgaaatatattgactttgaaaaagatattgctggtttcgaaaacggtcgctacgaagcaagacttgaccgtgcaaaataaaatgtagaagactacatgcataagaaccacgttcacatttttgataaaaagaagaaggaagtagctactatcaatggcttagttagaaatgtaacttatcaagatttgggcttgccaactaagttgggtgaaatgattactgagtatgcatacacgccaattgatgaaagaatggccgacgaaattcctgatgacgataagcatcacaatattatgaagtaaagtaaaacggtaagaagacaaaataaaatggtcttcttacctttttttatataaatcattaaaataagtaaaaaaataagcttgcaagatcagtgatctaacaagctcttggtctattaggcacgagtaactttaccagactttaaagccttggttgaaacccatacgcgctttggcttaccgtcaacaagaatgcgaactttttgaaggttgggcttccaagcacgacgagttgagttcaatgagtgtgaacgtttgttaccgaatgtagtcttcttacctgttacgtaatcttttgccatttgctaaacctcctttatttgtgatgtcatatttaattagattatcatatgttttcgcgcaattcaatactaaaaggattttttcaggtgtattttaattattgattatgtcgttactatgataaaataataaacgtatatatagataataagacggaggacgaaacatggctgttaagatcaagacaaaagatggtttgattgatatttcaaacggtgtaatcgcaactgttgttggtggcgcagctacgtctaactatggcgttgtaggtatggcatcaaagaatgccattcgcgatggatttgacgggattcttaatcgtgccaattataagcgcggtgttgttgtcaagtcagaagataacgaaattacggttgatgtgtacattattgttggttatggtttgaagatttctgaagtaagtaagaatgttcaagatagtgttaagttcaatttgaagaatcaattaggaatagacactaaggccgttaatgtcattgtacaaagcgttaaggtacttgacgaataacacaagcggaggttttaaatagtggttttaaatgagatagatagtaagcaatttagagatatggtacgtgttgccactcatcgaattggtaaaaatgcggagtttgttaactctttgaatgttttcccagttcctgatggtgatactggtactaatatgaacttaaccattgaaagtggtgctaaggctgtttcggaaaatccaagtactagtgttagtgatttaactgaaagcttggctaaaggtatgctaatgggtgcccgtggtaacagtggggttatcacttcacaattattccgtggcttttacaaggctacccaagggatgaagaccttaactgcacaggaattagcaaatgctttttcaaatggtgttgctactgcttataaggctgtaatgaagccagttgaaggtactattcttactgtagctcgtgttgctgcacaagccggtgctactaaggccaatgacaccgacgatgtaactgaagtaatgaaagctgtagttgaaggtgctaagagggctcttaagtcaactccagatttattgcctgttttgaagcaagttggtgtagttgactcaggtggtcaaggccttttgtttatctatgaaggctttttggaaggcttaatgggtgaaaactttgcagatcaatatcaacctgacgaaaatgaaatggatgaaatgatcaatgcaatgcaccaccaatcttcagttcaaagccaattggctactcaagatattaaaaatggttactgtactgaaatcatggttgatcttgatgccgatgtgccaaataaaaagaagtttgatttggaagaatttagaaagcacttgtctggcttgggcgattcattattagctgtttctgatggtgaaattgctaaggttcacgttcatactgaacaccctggtgatgttttccaatacggtagtcagtttggtcaattaggcaagatcaagattgataacatgagaatccaacacgaaagcatagttgaccaagatgaagaacaacaagaagcagttgattttgcagtgatcgcagttgcttcaggtaacggtattcgtaagttgtttgaaagtgaaggggtaaatcgtattatctcgggtgggcaaacgatgaacccatcaactcaagactttattgatgcaatcaagaagtctggtgcgaagaaagctattgttttgccaaacaacggtaatattgttatggctgctaagcaggctgctgaagttagtgatattccggttggtattgtaccaactaagactatttctcagggtttaaccgcaatgctttcattcaatccagatgcatctgttgatgaaaatgtggaagctatgacagaggacttagatacggttgtttcaggtgaagttactcaagctacccgtgatactgaaatcgatgaagtagaaattcataagaatgactacttgggaattgttgatggcaagattaaggttgacaatgctgatttaattaagactactgttgatatgattgaaaagatgctggatgaagattcagaaattatcacaattatgtttggccgtgatgctagtgaagagcaagcacaagaagtagttgaacaacttgaagccaaacatgatgatcttgaatttgaaattcatgatggtggtcaacctgtatatcacttcttagtatcagttgaataacaatgattgataatgcattatttgctcctgtcacagacttaaagggtgtagggacaaagactacagctgcattaggaagcttaggcatctatagtatttatgatttgcttttttactttccttttcgttatgacgaattacaaacattaccgttagatcaaatcatggatggtcaaaaagtaatgttaaagggaatagtagccactgaagcgtttgttagtcgttttggctataagaaaacgcgcttaagtttcaagatgagaattgaccatgatgtgatcatggtcaatttttttaatcagccgtggttaaaaaataaaattgagatcggacaagaagtagctatttatggtaaatacaatgttgcccggcaaagtttaacggcctttaaattcgtagcagccaaagaaaatgatagtggtatggcgccgatttatccggttaatcgacatgttaagcaaaaaaaagtagtagatctaattaatgtggctattgacgattttattgatcaagtgcaggatattgttccggaaaagttgcggcaagaatatcgtcttttaaaagaccaagtaattattgaaaaaatgcaccaccctaagaatagtcatgaggctgaactagctaagagaagtgcaatttttcgtgagttttttatttttgaattacaattagctttattgacccgtaatgatggtaaacaaatgggttatgcaaagaaatacgatctgacagaaattgctcaattaactaaatctctgccatttgaattatcagatgatcaaaagcatgtggttaatgaaatctttgctgatatgcattctgatggtcaaatgcggcgacttttgcagggtgatgttggttctggaaaaactgttgtagccgtttatgcgatttttgcagccattacagctggctatcaggcggctttgatggtgccaacagaaattctggcaactcagcatttcaaaaaaatcgatgtattgttgcgtcctttaggtgtgcgagtagctcttttaacaggcaatacaaaaacactggagcggcgtgagatctaccgtgaattaactgatggcacgattaatgtggtaattggcactcatgctttaattcaagatagtgttatctttaaaaaattaggtctagtcattattgatgagcagcaccgttttggtgtaggacaacgacaagctttgattaataaaggcgatcaaccggatattttggcaatgactgctacgccaatcccgcggacgctggctttgacagtttatggtgatatgacagtctctgaaatacatcatttaccagccggaagaaagccaattatttccacatggaaaacaagtagtcaaatgaaggaagtctatcgacaaatgcaagagcagctaaatcaaggctttcagatttacgctgtgacaccattgattactgagtcagagacgttagacttaaaaaatgcagaagaattgcatgaaaaattgagtcacgattttcctgatcaaaaggtagtcctacttcatgggcaaatgccaggtgcacaaaaagatgaaataatggctgcatttgcagctggtgagattaatattttagtgactactagtgtgattgaagttggggtcgatgtagccaatgcgaatatgatggtaatttacaatgctgatcgctttggtttgagccaattgcaccaattgcgtggtcgaattggtcgaggacaaacacaaagttattgtgtctttctagctgatcctaagaccgattcaggtaaagcaagaatgaaaattattgcgtcgaccaatgacggcttcaaattagctgaagaagatttaaagatgcgcggtgaaggtgatttgtttggtaaggctcagtcaggattgccagaatttcgtgtgggtgatgtagtaaataactacaatacattggtcgttgcgcaaaaagaagcacgagctttggttgcggctgatcctgatttatcagatccaggacataaggcacttaagcaagtgctagaatataagcaattagagcaaaacagaatttagaaaagattgtggtgaatatatgagaacaattgcaattgatgcgatgggtggcgaaaatgccccagatgcaatcgttaaggcggttttacaagctaaaactggaatgcctgagactaaatttttattatttggtgataaagaagcattaagaaaactaatccctgaagatcaaattaatgatcaattaggagttgtacctacaacagaagttattgctgatgaagatgaaccagttaaggcaatcagaaaaaagaaagactcttcaatggttgtggcagctaacttcgttaaggaaggaaaagctgatgcgttgctttccttaggcaatactggtgcattgcttgcttgtggaatttttattattggtcgaatcaaggggattgttcgtccaggtttgatgcctactttacctgttcaaaatagtgacgatggcttcaatatggttgatgttggtgctaatgctaagagtaagccagaatatcttttacaatgggccgaaatggcttcgtactatgctgagaagattcgcggcattaaaaatccgcgagtaatgcttttaaataatggagctgaaagcgacaagggtgatgatgttcaccaaaaggcctatgaattgcttaaagaaagtaatttgaatttcttaggtaatattgaaggtaatgaattgctattaggcaaggcagatgtggtagtaaccgatggctttaccggaaacgctgtacttaagaacattgaaggaacctctagcgtcttgcttcatttattaaaagatagtttattaaatggcggtgtaatgaccaagttaggtgccttaatggtgaagggctcgttatcaagcttaaaatctaaatttgatacggctaaatatggcggtgcagttttactaggcgttaatgcaccggtagttaaaacccacggtagatcaaatgaacgtccaatttatttcactcttaagcaagtagataaaatggttaaagaaaaacttgttgcagattttagagacgaattcgctgaaaaatagtacaatgttttattaaaaaggagaagttttatgtcagaagaagaaatttttaataaaatcaaagacatgatcgctgataattttgatgttgataaagacaagattactgaaaacactaattttatggacgatttagatgctgattcaattgatttggttgaatttatcttgcagctagaagatgaatttggcgcagaaattcctgatgatgaagctgaaaaaattaaaacaattggtgatgctgtttcatatattaagtctcatcaaggataattttctaaaaaaagccgtgtcgtgattttcatacgaccggctatgtgtttataattagaaaataaatagaaaagattaaatgcttttaataaaaaagctcgagatggaggaatgacctttggagaagcagagtgatcttttattagatattcaacacctgcatacggcataccgtttgcaagggaaattctatgatgcggcagacgatgttaatctgactctgaagcgcgacgagattttagccatcgttggtgaatctggttgtggtaagagtacaattgcctcaagtatcattggattgtacgaccataaaaatactaaagtaacaggggacattctttacaatgaattaaacctagttggcttgaatgaatcacttttcaataagattcgtggggacaagatcggaatgatcttccaggacccgttagccagcttgaacccattgatgcgtgttggtgaccaagttgctgaaactctttattaccacactgatatggacgaaaaggcacgtcacgcacgtgtcattgaattgtttaatcaagtaggaatgccaaagcctgaagaaatgtacgaaatgtacccacatgagttgtctggtgggcttcgtcagcgtgttgtaattgcgatggcgattgcatgtaagcctgaagttattattgccgatgaaccaacaacagctttggatgttactattcaagctcaaattttggatttgcttgaagatattcaaaaacaatctcactcagggattattttgatcactcacgacttaggtgttgtagcagaaactgctgatgaagttgcagtcatgtatgctggtcaaattgttgaaaaatctgatgtaaagacaatttttgaaaacccacttcatccatatactcgatcattacttaactcaatgcctcaatcagacgatacggatgaagatcttcatgtaattcacggtactgtgccatctttgaagaatatgccacgtactggtgatagatttgctgcaagaattccttggattcctgctagcgcacatgaagaagaacctaaggtgcatgaagttgcgccaggtcactgggtaagatgtacttgctggaagtcattccactttaaaaatgaaaagacggcaagtggggagtagtttatggcaaaagaaattattcaaatcaaagatttaaaggtctattacccaattcgctccggtttttggaacagaattactgattatgttcgtgccgttgatggagttaatttttcaattaatgaaggagaaacttacggtttaattggtgaatcgggttctggtaaatctactactggtaaagcaattgttggggttgaaaaagttactggcggccaaatcatgtataaaggtttggacgtaaccaaagcaagtaaccgcaagaagcttgattacaacaaggatgttcaaatgatcttccaggattcaatgtcaagtttgaacccaagaaagagaattgaagatatcattgcagagccaattagaaactttgaaaatctgactactgatcaagaacgtgatcgtgttcaagaattgttggatattgtagggatgcctagtgatgcgatctacaagtacccacatgaattctcaggtggtcagcgtcagagaatcggtgttgctcgtgccgttgctactaaccctaagttaattgttgcggatgaaccaacgtctgctttggacttgtcagttcaagcacaggttttgaacttcatgaagcacattcaacaacaatacaacattgcttacttgttcatttcacacgacttgggtgttgttaagcacatgtcagaaaacttggcaatcatgcaccgtggtcgtttggttgaattaggtagccgtgaagaaatctacaagcacccaattcacatctatactaagcgtttgctttccgctattcctcaagttgatgttgaacatcgtgaagaacacaagaaacatcgcgaacaagttgaaaaagaatttgaagaaaatcaaagtaaatggtacgacaaggatggtcgtgtatatccattacaacaagtagcacctaagcactgggtagctttgccaaaagatatggcccacgaagctaaacttgaagaattagaagaaaaggagagtgattaagcatgtggaaaacgattttacggcgtttgttaatcatgatccctcaattgattatcttgagtttgctggtcttccttttggctaaaatgatgcctggtgacccattcagtggatcaattaaccctaacaccgaccctaaacaaattgaagccttaaaacgggctgcaggtctgtttgatccatggtacgtgcaatactttagatgggtgggcaacttgttccatggtgatcttggtacaagttacatccagcacgttcctgtaacttcattgattgccgaccgtgcaaataacaccttctggttatcacttttaactactattttgacttatagtattgctatccctcttggtattacttcaggtcgtcaccaagacgaatggcaagatactagtgttagaatttttaactacatcaccttggctaccccaggattcgtattctacatcttaggtttgtggctcttcggtttcaccttgggttggttcccaatttctggttctgtttcagctagtgcctctggtttctggggcgtacttggcagtagaatctatcacatgattttgccagcaattctgtatgccttgattactactactggtactgttcagtacttaagaactgggattgttgataacaaggttgaagactacgtaagaaccgctcgtagtaagggtgtgcctgaaaatgtcgtcttcaacaagcacattttacgtaactcattattgccaatcgctgccttccttggtaacactattaccggtttgcttagtggttcaatgatcattgaaagtgtctttagttaccctggtatgggtaagttgttccttgactcaattggtcaacgtgactacactactttgactgctttgattttgatctttggtatcttgactctaattggtaacttattgtcagatatcatcatgagtatcattgacccacgtattagaattcaatagggaggagagaaaaaatggctgataagaaagaaaaagctactaaagaagacgcaaagcaaaaggctactctcccaccttctggattcaaggtggctatgcacgaaattgtgcgttcaaagtctgctttaacagctttgattatcattattgtaattttactgttcacttttggtggttcattattcttaaaccgtgctcaagtaactgaaatgaacattgccgattcatattatggttggggtgaagcaggccacctgttaggtactgatgatggtggtcgtgacattctgaagctgctcatcatgggtggacgtaactcaatcatgattggtatttcagttactgtaattactgaaattgttggtttggtagttggtttggtttcaggttactttggtggagcaattgactcagttatcatgagaatagttgactttatccagattttgccacaaatgccaattattattgttttgactactgttattcctaactacaatgccgtaactttggtattcttgattgcgatgtttggttggacggtcacggcacgttacttccgttcgttcgtcctatcgcagcgtggtcgtgactatgttttggcatctaagacttcaggttcatctaactttaagattatgttccgtgaagttttgccaaacattacttcaatgattatcattgacgttgttttgagtattgctggtaacattggtattgaaactagtttgtcattcttgaactatggtttaccaagtactacgccatcacttggtactttgattggttttgccaatgacccagttaacgttattaaccgtccatggttgtggttgcctgctactatcttgcttttggtaatttccttaagtattaactatgttggtcaagctctgcaacgtgctggtgacgcaagacagcgtgaaaactaataaagtaataattaaattaaaacagctctatcgcttagtagagctgttttttgtttatataactaaaatcttatttaaagtaaataaaataaatattaaaaattatttcataaaactattgtatttctaatttatggtggtattatttaatcatcaacttgattcaaataactattgaaaaagaattgtatcctagatgggggaaacaagtatgaaattatcaagagtattgggttcagtaggagtcgtttctgcggcagcgttagctttagttgcttgtggtaagagtagcaataacaatgctggcgcaaaggatgccaagaagtttaaggaaactactccagttaaggcagtcaaaaagggcggcactttatcatatgctgaagaaactgatacaccttttacaggtatttttaacaatgaattatcaacttctgctattgacacagatgtagcacagtttggtaatgaatcattatttgatactgatgacagttacaagattaatagcaagggacctgcaacttttaagttggaccgtaaaactaagactatcactattgaagttaaaaaaggtgttaagtggtcagatggtaagcaggttactgcaaaagatgtagagtatgaatatgaagttatggctaacaagggcacaaagtctcaacgttatactgcttcacttcaaaacattgttggtgtaactgaatatcatgatggcaaagctaagactatttcaggtattgatatgccagatggagcaaatggacgtaaagttgtaattcacttcaaagaaatgaaaccaggtatgcttcaatcaggtaacggttacttccttgaaactgcaagtccataccatcaattaaagaggattccatttaataaactggaatcttctgatgctgttcgtaagaatccattgttctttggcccttacaagattagcaagattgttcgtggtcatgggtacctaacaaatactactggagaggtaagccaaatcttgataaaattactgtttcagtaattaattcaaattctgcttctcaagcaattaagagtcataagtttgatattgcacaagttgttaactcacaatggcaacaagttaagaatactaagaaagtcaactttgtagctaaggttccacttcaatatggttacatgggctttaaggttggtaaatgggaaaatggcaagaacgtcatgaatcctaaggccaagatgaacaataagtcacttcgtcaagctatggcttacgctatgaacatcgatgctgttactaagcgttacactcaaggtctgagcttcagaattccaactttaatcccagaacaatttgggcaatactttgataagaatgttaagggctactcatacaaccttaagaaggcaaaccaattgcttgataaggctggttataagaagaaaggtacttacagagtacaaccaaatggtaagcctttaactattcaccttgcagctatgactggtagttcaactcaagaaccaatcattagaaattacatccaacaatggaagaagattggcttgaacgttaagttgactggtggtcgtttgatcgaattcaactcattctacgataaggttcagaatgattctaaagatgttgatgtatttatggcagcatggtcactttcaagtgaaccatcaccaaatgacctttacaacgagaaggctccattcaactttactcgttttgtaaccaagaagaatagtcaacttcttgaagaaatggactcacaaaaagcatttaatactaaatatagagttgataaattccatgagtggcaaaagacatgaatgatgaagcttatgttgttccaactacaaatgcatacagcatccaagcagttaacagtaagattacaggcttctcacttaagccatcagatgccaactcattatggtacaaggttggttacgctaagtaattcattgatcattagtaaaattaaaactccaaaattctaaacataaacaaattccttattattaaattctaataactaacttaatagaaaagacaggtatcttaatccgagtacctgtctttttcatgctattgttatatttttataagagtgataaactgaataagtcaacttgcttcaagtaatggaggaattttactaatgaaaaaggcaaaactttttgctggtattacactgttatcaggtgtagctcttaccttagctgcctgtggtaagtcagaatctcattctgatgaatcaaagactgcttctaagtttaaggaagctgttcctactaaggctactaagaatggcggtactgttaaggttgctgttgaagctgataccccatttactggtatcttcaacgacgaactttcaacttcagctactgatactgaagttatgcaatatggtgcagaatcactttttggtactgatgatcactatgttttcaatgataaaggtgctgcaacaattaaggttgaccaaaaagctaagaccgtaactgttgaaattaagaagggtgttaagtggtcagatggcaagcaagtaactgccaaggactatgaatacgcttatgaaattattgctaacaaagacactaagtcacaacgttacacttcaagtttagctgatttggaaggcttgcaagaatatcatgaaggtaagtcaaagactatctcaggctttgaaatgccagatggtgaaaacggccgtaaagcagttcttcactttaagacgatgaaacctggtatgaacacttcaggtaatggttacatttgggaagctgctgctccttaccactacttgaaagatgttaaattcaaggatttaatgtcaagtgataagatccgtaagaagccattgttctttggtgcttacaagttgcaaaaggttgttcgtggtcaatcagtaacttgggttcctaacgaatactactacaagggtaagccaaagctttcaaagattactgctacagtaattaaccctaactcagttgctcaaagtattaagtccagaaaatttgacgttactcaagtaatcaactcacaatggaagaacatcaaggatactaagggcgttaactttatcgctaaaattccactacaatactcatacttaggctttaaggttggtaagtgggatgccaagaagggcgaaaacgtaatggacaagaattctaagatgaataacaaggccttacgtcaagctattggttatggtatgaacgttaaccaagtttacaagcgctactcattcggtttatcattcagaattccaactttaattcctaagcaattcggtgattacttcgacaagaacatcaagtgttacacttacaatatcaagaagggtaacgaaatcttggacaaggctggctacaagaagaagggtacttaccgtgtacaacctaacggcaagcctttaactattcaccttgcagccatgaccggtagctcaactgccgagccaatcgttcaaaactacatccaacaatggaagaagatgggcttgaacgttaagttaactagtggtcgtttaatcgagttcaactcattctatgacaaggttcaaaacgatgacccatcagtagatatgtttattggtgcatggtcattatcaagtgaaccatcacctaatgacttgtatagcgaaaaggcttcaatgaactactcacgtttcgtaactcatgaaaacaccaagttacttgacgaaatggattcacagaaggccttcaaccacaagtacagagttaaaaaattccatgaatggcaaaagtacatgtttgatgaagcttacgtaattcctatagctaatagttactcaattactgccgttaacaagaagcttactggttactcacttaagccatcggattcaatgggtaatggtttccctaactggtacaatgttgcttacgctaagtaaagcaattatttaaaattacaaaagactgtttctaaattttagaagcggtcttttttctgtgacccgaaaactggtataatttataggtataaaaaggggcatttttatggtaagtacaaagtttttaaaaaaattaaaagacgattataatatcgaatttaacaatgaaaagctattagaagaagcatttacgcattcttcatattcaaatgaacatcccaatgatggaattcgtgattatgaaaaactcgaatttcttggtgatgctgtgctagaattagccgtttcgaattatgtttatcttcattatcctaagttgaatgaaggtgaattaactcgtttgagatctaatattgtccgaactgaaggattttcagaattcgccattgaatgtggttttcaagatgagattcacttgggcaatggtgaagaaaaagctggagcacgacaccgcaaaactttactggaagacgtgtttgaagctttcaatggggcacttttccttgatcaagggatgccagcagttgaacattttttgcatttaacagtttatccattgattgataagggtgaattcgatgattcacgcgactataagacagacttgcaggaagtattgcagcaagatggtcctgtgaatatcgaatacaccgttattagtgaatctcaattaccttcacactttgttgttgaactaaaaattaacggaaaagttgaatcaaaaggtgagggtcacaataagaaagcagctgaacaacaagctgctaagttcgctttacaaaaattagaaaaataaggggatgaaaaagtgccattaacagaattagtgctcgatggttttaaatcattcgctgataagacaactattcattttgatgatggaattaccggaatcgttggtcctaatggttcggggaaaagtaacattactgaagccgtacgttgggtaatgggtgaatccagtgctaagtcactacgtggaacgaatatgaaggatgtcatctttgccggtagtcaatttcgtaagccgctcaataaggcggaagttactttagtttttgataataaaaagcgtgagttggcttttaattcagatcaggtctcaattactagaagaattctgcgatcaggtgacagtgaatttttaattaataatcagcaagtgcggatgcgagatgtgcggacactctttcttgattctggaatttcacctaatagcctagcaattatttctcagggtcgagttgatcagatcttaaattctcgtcctgaacaaagaagagtaatctttgaagaagctgctggtgttttgcattttaaacaacaaaaagaagctgccaaggcgcaaatggagaaaaccaaggataatttaattagaatcaatgacttggttaaagaacttgaaggtcgattggagccgctgcatgagcaaagttcgctggctaaagaatatcaatttcaaaagaagggactagatcagaaattaaaaagtctgttagcttttgaaattgaggatttaaaccggcaaaaagaagaagtccaaaaagcagcagataggaaccgaatcctgttaacaaaactggataatgaagtaaaaggttcgcaaagtgctgtttctgaaaaacgggcagaatatcaaaaaattcaaaatgagcgagagcaaacgcagagtgaattattaaagctaagtgaccaattatcacagatcaatactaacttgcaggtcgcacagcaatcacaacagtttaataattcaactagggtagaaactcaacgtcaagttgaagaattgaaaaatagcttggttaagttaaaggatgaattgtctgaactgcagcggaataaaaagcaacttaagcaggagcaagatgctttacaagagcagcatgatcaattgactggtaaattgcacgatgatccagaagaattgagtaagcgactagaagattgtcgtaacgactatattcaacttttacaagatcaggctacaactaataatcagattgttaatctgaatactgaattaaaacgtagtcaggcagacactacttatcaaaatagtgatgtaagcaagcagctaaccgatgctcggactgaactggaaaagctgagaactgaaggcaagcagctgacagttaagcggcaaaaggaaaaagaaaaatttgcgcaagttaatgatcaaaataatgatttaactaaacagattaatcagattcggcaagccgttaacgcagagcgcagtaaattagagaaagttgaagcgcgacatgaagctttagtaaatattcaaaagcggcatgagggttattactacggtgtacgtaatgttttgaatcatctatctgatttccctggtgtgatcggggctgtgggtgaattgattacatttccagttgagctagaagctgcaatgacgacagctcttggcggtggcgtacaggatttgattactgaaagcagagttagtgctagggatgcaattaatcaattaaagcgtagtcgtagtggacgagctacttttttaccattagatggcttgcgtcaatatactattccacagtcaactatcactactttgcaatcttttagtggctttaagggcgtagcaagtgatttagttgaaagtaaagccgatcaagatattactgctgcgattaattatttgctgggtagtgtgattatcgttgatacgattgatagtgcaatgtcaatttcacgtcgagttaaccgctatcggattgttaccttagatggcgatgtgatttccccaggtggttcgatgactggtggtcaaagaaaccaacgtaataattcaccactgcagacggcaactgaaattaatcagttagagaagcaattacagactttacgacaaaatttggctgaagatcaagaacggttagatgagctagttactcaaggtgaaaaagttgcggctaaattgcaacaactgcgtgatactttgcaggagactaatcaagcgattaatgaagctgctatttctttccaaaatcaagaaaaggaagtaaagcggctaactgatgctaatagtttatataaatctcgagtaaaagaacaacaagatcagattgctgctttaaagaaagaaatcacccaggctaatgatcagcaggaacaattggctaagcaaaatgaagtacaaaagggcaaaatgaatgacttgcaagaaaagattaagaacttcaatagcttaagtcaacgtgtacaagaggaattatcaaagcttgatcctcaaattgcagtttatactaataagttggaaaacttagctagtcaggaaaaagaaaaaaatattcagatcactaataatcagaagcaaactgatagcttagagcagaaattaactgaattaagtcaaaatggtgaattatcagttaaaaagaattctgatttacaaacacaaaaagctgaaattaagcaaaagaatgaaactctgcaaaagaagctgaatgaacttagtgcgcaattaggacaagttgatgcgcagattaatcaacttgaccaagttgccagtcgtaattatgatttacgcaaagatgcagcaattgaacaagaagattactcagtaaagattgcgaagtttaattccgcaattgatcagcgcttgtcaactttgagtgaagagtatgccttaacgtttgaagctgctttagagcaagcagaaggcgaaaatactgaagaaaagcgcaatgaactggctaaaagcgtgaagttgcatcacatgtcaattgaagatattggccaagtaaatcttgattctattcaagaatatgaagatgtgaaaaagcgctatgactttttgaatggtcagcaaaatgacctgttaaaagctcgtgatgaccttgaaaagtcaatgaacgagttagatgaagaagttaagacgcgcttcaagagtacctttaatcaagtagcatctagctttaagagtatttttccagttgtctttggtggcggtaaagctagattggaactcactgagcctaataatttgctagaaactggaattgagattatcgcacagccgcctggcaaaaagcagcaacgtttaagtctgctttctggtggtgaacgcgcgttaaccgcaattactttgttgtttgccatgttgcaggttaatccggtaccattttgtgtacttgatgaagtagaagctgccctggatgatgcaaacgttactcgttttgcgcaatttttgcttaaatacgatatgaaaacccaattcatcgtgatcacgcatagacgagggacgatgcggcaggctgaccaactatatggtgtggttatgcaagaatctggcgtttcgcaagtattgtcggtttcattaaaagaaatgaagaataaaaatgaggtgaaatagttgggtttatttgatcgaataaaaaaatcactctttggtaaaaaagacgaagaggatgaaaacaaaaaagaagaaaaacagactgagcaagaaaatgaagctaagcctgaatcagaagataatgatcaagaatctgaaaaagtagttgatgaagctaaatcgaaaactgaaactactgatgaagaagaacaaacagtagaagcacaagaagactctgaggtagaagctgaatctggtgatgaagaaaaagcagtagatttagattctaaacaacagcctgaagaagttaaagtagaagagactactgagactgaaacagaagaacagctttatgaaaaggggctagaaaagactaacaagggatttggtgcaagacttaacgccttttttgccaagtttagaacagttgatgaagatttcttcgatgatctagaagacttattaattgaatctgacgttggctatgaaactgctgaacaattaactgatgaattgcgtgaagaggctaaattgcaaaatgctaagtcacgtgatgacttgaagcgagtaatcgttgaaaagttggttgacctttatgataaaggcggcaatagcgaagatgagcaattgacgtataatgctgaagctaaacctaacgtttacctatttgttggtgttaatggtgcaggtaaaactactacaatcggtaagttagccaaacgttttaaggatgaaggaaagtcagtaattttagctgcggccgatacctttagagcgggtgccgttgaacagctagttgaatggggaaaccgtgttgacgtacccgtagttactggtaaagaaaaggctgatcctgcttctgttgtttatgatgcaactgaacgggcaatcagggaaaaagctgactatcttttagtcgatactgcgggacgcttacaaaataagaagaatttaatggctgaattggaaaaaattcaaagaacaatcaagaagcttttaccagatcagccaacagaaaccttgcttgtgttagatggttcaaccgggcaaaatgcgcttttgcaagccaaagactttgacaagaccaccgaattaactgggcttgttttaactaagttggacggctcatctaagggtggtgtagttctagctatccgtaacgaaatgaatttgccggttaaattggttggcttaggcgaaagagctgaagacttagctgattttgatgctgcaaattatgcgatcggtcttttccacggcttggtctagtgataaagttagagatgtaaatattgttttataaggagaattttatgaaagaatatagtgcttgtactactatcttagttggtaaaaatgcctcgattgatggcaccactatgattgctcgtaatgatgacacttttcgtccaattaccccacaaaagttcattattgagccagcccgtcatggtgaaaagaaacatattaagtcatggttaaacaagtttgaaatggacttgccagaagatgcgcaacgtgtaccagctgttcctaatgttgactacaagcatcgtggctactacgatgaaagtggaattaaccaagaaaacgttgcaatgtcatgtactgaatcaacttatggtaatgagagaactttagcatttgatccacttgttaaagatggattagatgaagactgcatgcagacttctgttttgccatacattcattcagctcgtgatggtgtacaatatttaggtaagttaattgctaagtacggttcaccagctggtaactcagttttattcagtgataaagatgaaatttggtacatggaaattgttacaggtcaccactgggtagccgagcgcattccagatgattgttacgctgcaactggtaatcgagttgcgattgaacaagttgactttgataatcctgattacttcatgtggagtaaaggtattcaagaatttgttgaagaacaccatttgaacccagatcatgaaggctggaacttccgtcatatttttggtacctatactgaacaagatcgtcactacaacaccaaccgtcaatggtatattcaaaaattgttcaatcccgaaattgaacaaaacccacaagatggcgatattccatttattcgtaaggcagctaagaagatcactaaggaagatattcaatttgctttaggttcacactaccaagataccccgtatgatccatttggtaagggtacggatgaagaaaaacatcgctaccgtccaatcggtttgaaccgtacgcaaaatgctcatattttgcaaattagaagtgatgttccagcagatcgtgcggctattatgtggttatgtatcggtggtccaactttcactccatttgtaccattctttgctaatatgaatgatactgatccttcatataacaatacctcaatggattacaatatgaatgatgcatggtggtattacaagtcatttgcagctatcgttgaaagtcattacccacaatttgttcagcttgatactacttatttaactgaacttaaccgctacttcagaggtcgagttgaagaaattattgctggtgcagaaggtaaatcaggtgatgaattaactgaatatttgactaaggaaaatcaaaagactgttgcccatactcgtaaggaaactgaaaagctttggggtcaaatgatgattgaatcgatcaacatgtccaaacttactttcaatatggatgaaaatctttaataaattcaaaacagctcgaaaaagggctgttttttataatatgtgaaatgaaaggaatatagacaatggcagaaggtactattggctcattttttactaagattaacaatgaagttgaaaaacaaatgaataacgatttaaaaaatttggtattaatgctaatgaattggaaatgcttattgaattaaatcatcatcagcatggcaaaacttttgaaaagttggctaaagaattgcatgtaactaatgacaaggtcaaatctttgacaaaaaaattggctgccaaagatttgtgcaagaaatttgaaaagcaccgtgcagaaactgaccaaactattacagggatgctcagtaaagatgaaactcttggcttggttaatgtactgaaaaagatgcttaagtcgagtgaagacaataagtaatgtaaaatagtagaactccagaagttaattacttttggagtttttttatgcaaaaattattgacaaatctttaatataatattactgtattaagtaaatagaacagtaatattattagtgaaaggataaaaatgtcagaaattttaagagtggatcaagtaactaagacttatggtaaaaaaggtgagaagcaataccaagctttaaaaggaattagctttgccattgaacaaggtgaattcgttggcattatgggtgcttctggttcaggaaagacaactttattgaatatcttgtcgacgttagataagccaactagtggacatgttttagtcaataagcaagacattactgcacttaagaacaatcaaatggcagattttcgcggaaaagaaattggctttatttttcaagatttcaacttgctagataatttgactaatcgcgagaatatagccttgccattatcgcttcaaggagtgaaggcaaaggatattgacggaaaagcaatggcgattgccaaaagattgggaatagaatctatcttggacaaatacccagctgaaatttctggtggtcaaaaacagcgtgttgcttcagctcgagcattggtccataatccggcaattttatatggtgatgaacctacaggagctttagattcacaatcagctacggaattattgaaaacaatggcagacttgaataagaatgatcaagtttcgattctgatggtaacgcatgatccttattcagcttcttacgctcaaagaattttgttcatcaaagatggaaaaatcggcaaagaaattaaaaaagaaaataagaccagagaagaattttatcaagatattattgctgaattaggtagacgttagagggaggtatagacgtgctttggaaattatcactaacagggctaaaaagtcgctttaaagattatgctgttttgttttcggggctaactctagctgctgcaatcttttatatgtttatgaccattgcaattaatccagcttttcttaagggttcaatggccattgccttttcaattacacagatggtctttatttttgggatagcgctattagctattattaccctagtctatattgtttacgcaaatagttttttgcttagtatgcgtaaaaaagattatggtacttatatgatcctaggagcgagaaatagtaaaattggccgtttaatttttacagagacggttgttattggtttactcgctactgcattaggaattttaattggtatcggcttgactcaagttgtttctcagttattaatctctcaactgggtttgcagctgcataaattcttaggcttttatttaccggctattttatggacagttgttttctttgtagttttatttttcttggctgcaatttggaatcggcacaaattggtaagtactagtgtaatcaagcttttgcatgaggatcaaaaaccagttaagttacgtaataaccgaatctggaaagcaactgaagtaattctaggccttgcccttctagccattggctactgggcaatgtgggattaccatcagttgcaaattaaatcggttgaaattggttttgtcactattttggctggttcatattttgtatttgattctgtatttactacagttatcaatgctttacggaaaaataaaaagtttaaatacagtaaactgcattcttttaccttaggtcagctaaaatttaggttaggtgattacaatagagttttaactgttatttccttgctttttgctctagcattaggtgcgatcactgttggattaaactttaataatatgacagagactgctcttcaggcaacatattatgatgctgtgttgtataaaagggatgctaaagttaatcaacaacttaaaaaagttgccgttagaaaacaaacgactttgaattataaggtcaatgggaaaaagaagtttcctgttctatatgttactgaccaagaaattgctaagaaaaaaatcaaattccaatctggtcgaaagaacggcgaccaaatgaattggaagacaaagacgattacagttgcaggtgtaaagaataaaaaacaagagatgaatttccaacttgctagtttaacaccttattctgattatgaggttaaagttgtaactccagctgaatatgtgaagattcctggaaaaaacaaacaagtaaccttgctattaatcaataactttagaagtaattttaataatattgaaaaattgcaaaagatgtcacttgaccagacagttactaaggatgcacaaggagtttatgtttctctgaataattctaaatctgctcaatatcgcttagtagcaagcgttgcgtcaggttttgaatttatgggcttcttcttaggcttagctttcttagctatgttagcttcaaccttaatgtttaaagtgctatcaggagcaaacagtgatcgtcctcgatatgaaatgttgtggaaggtcggatcaagacgtaagttattaaagagctcgattaaagcggagattggtaccttgttcgctttaccggctgtcttgggtgtgattgatgtattatttggactacaatttttcaaagggattttagctaatccatacgataaaatttggattccatttacgatctttttagtattgtatttgctttattacttaattacagtaaaactctatgaaggaattgtattgaaaaaataatggtacgaaaaaagatctgcaaaattgatacattccctgtcaagtagacagtagaattacataaagcttttattcctcagttgattaataatcagctgaggattttttggcttctcttattttcttttcgtgtattttttgccagtatttctcaattcgatgatttggtgcaatagggcaattcttaatattgcctttcatcgcttctttgcgcatttcaccagcagttaaaccgttaaaacgtttctgtggatcttcattaatgtagtaatctattgtcttacaaatagaatcattaagttcatcataactggccacttgaggatgaagaataactcgcatttctttgataatgccttgccagccttccattggaccattatcaatacagcagccaacacgagacattgattgcgtcatgccttggtcttttaattggttttggaaaggtgcgcgagtaaattgaaaaccacgatcactatggaaaagcggatgagcattagggtatgctttaacagcctgcttataggctgcttgaactaaagcagtatcgtttcgtttactaattgcgtagccaacaggatagcgatcatatagatcaaacacagtacatagatatgccttaggcaggttagcagcaacgacttcagtgatatctgtacaccatttttcattaggtctagatgcattaaagtctctttttaacttgttttcggccgttttctcaggcgttgtatgcttgaactttagcttctggtatctaggcttttgtgatctaatgccattgatacacatcaagcggtaaacagttttatgataaaccggcttttcatcagacatctgtcgattaactgccatggtcatcttttccgtcccaaacagactgttgttagacttggttatttcaatgatctttgcttcaatctttttgtctcgttcttcacgcttactcggcttgcgcttaggatcaaagtatttgtaataagctgagcgtgctattttagcccatttgcacattaaatcaatcttccaattgtacttttgatggcagtcatggattaactgatatgtttcttgtttccagcgtctttttattgcggcttgtctgtatcttggttgtccggcaagcacatcctttctaactgatctaatttttttaggaattcgttcttagtttgttcttctttgagctgacgctctaattccttaatttttcgattagccagttctaactcagttagctcttctggcttcttatgtctgcctcgtttatctgttaatcctgtttcaccattagctagatatttgtgtgtccagctgtaaacctgctggtaagaacaatcaaatttgacagctgtttgagtgtaattcttgtcgtgattaagacagtattgaacaatctgaattctttcttgctgggtagtttttcttcttgctttagtcatatagacctccggatggggatcatattcccgattttctatatgactattatacttggaaacccattctgatactgttccattgcttctaatgccatatttattagctaaagaaggtaacgacattttgccagctaaatattcttgaacaaccttttctttaaatgccttagagtaatgattattgtattgagcattacttagaagggtatcacgattgctttgatattgatgaacccatcttcttacttgcatcgctccacttttacttggcatcttaagccgtttagctatttcaacgctgctcctattaccattcaagtattgttcaactgcccatatcttttgatcgaatgaatatttactttttctggacataaaaaatcccacctccatggataattgaatactttatgtatttcaatcgtccatggaggtgggattgtatcaaatgcagatctttttaactgtatttagattaattttatttattttgcttatttaaaattgaatgacgaacaccatagctaaagtaaatgattaagcctaaaataaaccaaataccagcataaaatttagcttggtagtcaagccctaagaagacaattaaagcagccatgaaacctaaagcaggtaaaactggataaaatggcatcttgaatgaaggatcatcaatgtcttttccttcacgtggacgcaacttataaatacctaaagaaacaaacataaaagcaattaaagtaccagctgaaaccaattgtgacaacatggagaaggggaaaaatgctccaagtaaaattgctacgattgttaatgtccataaagcattattaggtcgacgatctgcattcaacttgcccagccatttaggaagcatcccgtcacggccaaatgaatagatcaatcttgaaccggccatactcatcccaatcaaagcagtgaacatccctaaaacagcaatggtttggacaatgatggcaacaattggatgaccagcaaaccgtaaggctaaacccactggttcagcggaattagcatacttctgataaggcataattccaattaaaactaaactaactccgacaaataaagtaacagcaatagcaagtgagcctaaaatgctgcgaggcatagttttttgtggattaattgcctcagctgagttagcggcgattgaatcaaagccaatgtaagataagaaaatcattgaaacaccagcatagattccttgccagccaccgaatggaccgttagcagtcatcttgtatttcggtataaatggggtgaagttaacttttttaattgcaaaaacgccaacggcaataaagagtagaatggctaacacctttaatacaactaaggcattttcaacgcgagctgcccttgaaacaccatgaccaattaataaggcaactaacaagattgaaactaaagaaatgatatcaataataccaccgttattgccaaaggcgttagataatgacgcgggtagtttccaacctaatggtgcgattagagctctaaagttagcagaaagccccgaaccgacgaaagccaaagcaatgaaatattctgctagaagggcccatcctgctacccaaccccagaattctcctaaaactacgttgatccatgaataagctgatcctgcaaatggcattgcagcagccatttctgcataggcaaaagccactaaaccagcagcgattgctgctaaaataaaggaaatcgctactgcagggccggtatgcttagctgcaacttcaccaggtagagtgaaaattgaagcggagacgattgttccaacacctagagctaagaagtcctttacttttaatgagcgcaccaggtgtccatctttattttcatagacgcgtggatcttctttactgttcattctctgccaaagattcacaacgcaacttcctccttatgttaaaatatattcatctaattataattaaaagtacgttaaaaaatcaactattacatatttgaaattccactttttttagaaattgttatctaagataggttaatctagcactagcttatgacctttgttatactaaagactggtgaaaatcaatggatgaactaactaaaaacgaggagctaggcgatttatatgcctactatggctctttattaacccaggggcaacaatcttattttgaagactattactacaatgatttgtctctaggcgaaatagctgctaatcatcaagtatctcgtcaggctgtctatgataatctcaagcgctcaagtaaaattcttcagaactatgaagagaaattgcatatgaagcgcgacaacaatcaggttgaagatgtcttggcagatacgcttttatctttagataatggtgatagtgaagctgctaaaaaagaaataaccaatttattaaatcaattgaggggagaatagcccatggcttttgaaaatttaagtgaaagaattcaaaaagcattaaaaaatttaactggcaaaggtaaggtctcagaagaagatattaataaggctagtcgtgaaattcgacttgctttgttagaagccgacgttaactttaaggtcgttaaggactttattaaaaccattaagaaagaagcccttggcaaggaagttcaggaaagtttaaacccaggtcaacaagtaattaagatcgttaatgaacagttaacgaagatgatgggtgaagaagcagttcctttaaacaagtctaagcatattccaactatcattatgatggttggtttgcagggaactggtaagactacgactgtgggtaaattagcctatcatttgcaaaagaccgaaaaggcccgtccgctgttgatagctggcgatatttatcgtccggctgctgttgatcaattgaaacaaattggtgatcagttaaaagttccagtatatagtgaagacggagaaaaagacgtagctaaaattgttcaagatggacttgcagaggctgaaaagaacaagaatgactatgttttgatcgatacagctggtcgtttagaaatcgatgaacctttaatggaagaattagagcgggtaaagaaagtaacccatcctgataacattcttttagtcgttgatgccatgactggtcaggcggcaacagatgtagccaaaggctttgacgaacgccttgatgttacgggcgtgattttgactaagttagatggtgatactcgtggtggtgcagctctttcaattcgtgcggtaactggtaagccgatcttatttactggtcaaggtgaaaaattaagcgatttagatgttttccatccagatagaatggcatccagaattttaggtatgggtgacatgctttccttaattgaaaaagcccaacaagattatgatgctaaggaagctgaaaaagtcgctgaaaagatgcgggaaaatacttttgacttcaatgattttgttgatcaattgcaacaagttcaaaaaatggggcctcttgaccaaatcatgaagatgattccgggactagctaataatccgcaattaaagaatctaaatgttgatcaaaagcaaattgatcatactgaagcaattgtttattcaatgactcctgaggaacgagaaaatcctgatatgcttaatccaagccgtcgccgaagaatagctgctggttcaggtcgtcctgtagttgaagtcaataggatgattaagcagtttaagcaaatgcgcgacatgatgagtaaaatgtctaaaggaaatatgaagggcttgagcaatttgcctggaatggattcgccaatggctaagatggcaatgcgccgaatgaacaagaatttcaagaaaaataagaagaagcgtttacgcaaggtaaaaagattccattcttaaaaaataaactgttaaggaaaaatactttacacctgttaagtttggtggtatattattaatcgttaagttttaggaggaaattaatttatgtcagttaaaattcgtatgcaccgtgctggtgccaagagaaagccattttacagaatcgttgttgcagactcacgtatgccacgtgatggtcgcttcatcgaacaagttggttactacaacccagtttcacaaccaaaggaattgaagcttgacgaagacaagatctttgaatggttacaaaaaggtgcacaaccttcagacactgttagatcacttctttcaggtgctggcttgatggctaagttgcacgatgcaaaatacaataagtaattttgctattaattaagagcttgatgccgtgtgcttcaagctttttttatacctaaaggagaaaaaatggaatattacgatgttgctcggattttaactacgcacggtttgaatggtgaagttaaagttagtataattactgatttccctgaagatcgttttgctatagggatgcatttggcaatcaaaggtgaaacttctcaagttttaactgtggccaagagtagaccttttaagcaattttggttagttcaatttgcagagattactgatattgatcaagctgaaaaattaaaaggaaaaatactagttgttagtgaagccgaccgcggtgaactacctgaaggcgtttattattataaggacatctttgactgtgatgtcattgatgaagaatccggtaagcgcttgggtaaaatcactgatattgaatcgcctggtgctaatgatatttggctagtccatgaagataatggtaaagagtattggattcctaatattgcatcggtggttaaaaaagtagatgtagctaataaaaaagtctatgttgagttattggagggcttacgcgatgaagattaatgtattgacactttttcctgatatgtttgctcctttgcaagtttcaatgttgggacgtgggcttgaagataaaaaatgggagcttaatttagttaattttcgtaatttcactaccgatgtacatcatcatgttgatgatacgccctatggtggtggcgctgggatggttttgcaaattatgccgattaaaaaagcacttgactcgttaccatccacaggtaaggtaattattactgcaccacaaggtaaaacttttaatgaaaaaatagcgcaaagctgggccaaagaagatgaattaacctttatttgcggacattacgagggctttgatcagcgggtttatgacttggctgacgaaactgtttcaatcggtgattatgttttaactggtggtgaattgccaacaatgagtatgattgatgctacagtaagacttttacctggtattttgggcaatgcagctagtccagttgaagaaagcttttcacatgggttgttagaatatccgcaatatacgcgtccagcagattttgaagggcaaaaggtgccagagatattgactagtggcaatcatcaaaaaattgcacaatggcggcataaagaggctcttagaacaacatatttgcatcgacctgatttgctcaaagaacgagttttaacaactgaagaaaagaaaatgttggcagatattaaagcagagcttgattaagcaagctctacttgatatactattcatcgtggcgtgaccacaatgaataagtttaggggtgttccgctggcgttggtacgttgatgaatgccgaagaaggagaaaagtatattatggatccattaattcaagaattaactaaagaacaacttcgtgacgatattcctgcattccgtgcaggtgacactgttactgttcatgtacgtgttgttgaaggtactcacgaacgtattcagttgttcgaaggcgttgtaatcaagaagaagggtactggcatcggtgctacttacacagttcgtaagattgcttcaggtgttggtgttgaaagaaccttcccagttaacgacccacgtgttgctaaggttgaagttaagcgtcatggtcgtgtacgtcgtgctaagctttactacttacgtgaacgtcacggcaagtcagcaagaattgctgaagcacgtcgttaatcataacgtcaatcataaaaaggtcagttccagtggaactggctttttttctacccaaaagttgtatataaaatgctatgatggagttatggaatgaatgaggtgaaataaatgaagttcaattgcaaatttgcacttgtggcagcaaccgtattgacagtagcacttatattatcttttcccaatatcacgactacggtacaagcaacgacgaagaaagcccaagcagctaagaatacaatccgggtaaataaagcaccaataatttatgatcgtgcaggtaattataattcgaaatatcatcaaaatatcaaagctggtactcgtttaaaatatagtggcaagacttatattattcagcagcgctttgcagctgggattcctgtgccaactagtcgaattattggtggtaagctttactattcgattggtaaaggaggctatgttaaagaaagcgatgtgttaacctggcttggtaacacaaatacggtcaagttacattttcggcacaagaaaaattatatttatgataaaaatggtaaaaaattagttagctataatggtggcaagaattattttactaataaacaaaaacccaaaattgaggtaccatactataattcgcctaagcaattatttaatattggtaagggtggttatattgatgccagccaagtaactactttgaatggcaagggaaccgtgtttttaaataataatgcacctatttatgatgcaacaggcaagcaagtcaagaataaaaatctaaaacaaggcacggttttaaactattatggtaaacctaagaaagcggctgctaatactcaattttattattatcaaaataaaactaagatgactttacctgcaattcaacaaggtgatcatacttattttcagattagtaaaacacaatatatcaatgcggcagacgttgctttagtagatggtaagacgttgtgggataaaggacctgtgagtgtgtctttaataaatgatgcatatgcgtatactgccaaatttaagcaaaataaaaaggtgctttatcgtgctggcgctaaactaacggttgatagaatcaaaatagaaggtaaaaaatcacctcaactttatttacatgttaaaggtaccaaaaactatctttattggagtaatgaaaaagactatggcgcatcaccattagattatcgtcacggttcaactaatttaatattgcagacactgttgcataattagtctgtgtgtaatacttttaaactgatatcataaaggactattatcttaatagaaggtgatagccttttattttaaaaagatcacaatgataaaatggctgtatagtagtaatgatgaaaaaagattgtgaagaaattcaactgtgaaactgctgtgaaactaagataaaaatcacaaaactggcagatatctattactaatcttgatataaaggcatttgttattgtgaagctatttttgtaaaaaataatattaaatgtggaattagcgttagaatcaatagttatccacatttgtaaatgtccccagtaaagtcgagtaaaacaaaaatttaaaagaagatggaaaaatggattatccgaaaaaactgattgacgaagtgaaagaacgatctaaaggcatgcagctagaaggaattaattctgtctcgggtccccaacatcctttattaatgattgtcggtgaagctcctggtcgaaatgaaattgttaataatattccctttagcggggatgcgggtaaggaattggataaatcattgaagcagattggtctgacacgtgatcaggtatatattacatctgctgtgagaagtcgaccttttgcaatcaaaaaggtttttagcaagcgtgaaaataaagaagtaatcaaatatcccaatcgtaagccaaccaaaaaagagattctagctcatgcgcctttcttagattttgaaattgaatatgctcaaccaaaactaattgttgccttgggtaatacgggattagaacgtcttttggggtctggtcataagatttcagctgaacatggtcaagcaattaaaaatacaccaattttacgtttaaatgaaactaaagacggctatatttggtcaaaagaaagatacactattttcccagaatatcatcctgccgctgttttttataatcgcaagctaacagatgatattattaaagattgggataaaatcaagccgtatgtagaaaaggaaaaatctgaaaatgagtaatgaaacttttttgattccaattagacaaaataatgatttatcggatatcgctttaaatgaattacgcatggatctagatgagcatgctttacatcaacgttattacactgatattgcttatttagcaggaaatagtcgtaagtatagtctaaatagtgtacaaaccgttgcgagtcctttgataggtaagaaaattttatttttgggttcttccgttacttttggttttggcgctttgggtgaaagctttgttgattatctttggaagcgtgatggcgttgctgcaattaaagatgcagaaaatggtacgaccttagttgatgaagatacttataagacaaacgattcttatgttgctcgttttagagaagagttgaccgaatcacaacctgatgtttttgtcttacaactttcaactaatgatgcaaatcaaaataaaaaactaggcaaaattactaatcaaaactttgataccaaaaccattacgggagctttggaatatatgatttcaacggctcaagcaaggtggaaatgtccaattttaatttatactaatccttattttgctaacccgttatacaaacagatggttgaacgagtacacgaactggctcaaaagtgtcagctacgacaagtttaaaaattgatatgtaaatatgttacttttatattataaagtatgatataatttcatcacaaggtggtgagattttttgtctagaattatgtatttaaaagaagctgctgcttatcttggtaaagctccattcactcttcaaagttgggaccgggctggtaaattaaaagcacatagaactgctaacaaccggcgcttttactatcaatcagaacttgatcaatatttaggtcttgatcataatgaacctattgataaacgtaaaattatagcttatgcgagggtttcttctaatgggcaaaaggatgatttaaaagatcaagtcgcttttttaaggcaatttttgaatgctagaggcattattgccgatgggtatatttcagatattggttcagggcttaactataagcgtccaaaatggcttaaattgattaaagacattgataaaaaccaaataaaagaaatttatgttacctatgaagaccgcttcatccgctttggctttgatttctttgaaaagttttgctcttggcatgactgtaaaataattgtcttaaataatgaagatacttcacctgataaagaattagtccaagacttaatcagtgtgattcatgtattctcttgcagactatatggcttaagaagatataaaaataaaatcaaaaatgatcctaacttaaaagaataggcctaagttaaaaatcctaaaggaggtgaaaatgatgactaattattaccttaagacacgtgtgtatgagttatttccaagtaaaacaatgaaagcagtgcttgaccgcaactgtgattatcgcagatattgttggaatcaagctttagctttatggaatgatctatattttgctcatcaaatctacgataagattcgttatactacttttacgcctaaagaaaataaaaaaacacaccaaatcaaaattattaaaaaagatgttcacttaaatccaagtccaagctggcgcttggtacgtgataagttagttgaagataaggaagattggcagttcaactattcggctcatttgcttcaattagcagtccaagatttaggcaaagcatggaataacttttttgataaggctcaacctgattggggcaagccgaggtttaaatctaaacgtgaagtaagacagggctttaaaagcgatcaagctaaggtgattaatggagagctagtcttggaaaagcccaaaggcttaaagcaagaatgggaagcaattggcttatctgaaaaaccgttagattatccaactggtgtcatgagtatttatcgtgaaagtggacgctattttgtgtctattccatataagatacctaaaaatgaatttaaagctaaagcaagtacaggtagagttactggtgttgaccttaatgtgggacactttaactacatagctggtgatgaacgaatcttacctcaaaagcttgaatatacttatgagaagattaagcactaccaaagattattagctagaaaacgtaaagtaaacggacgaaaagaaagcactaaaagtaataattacttgaagacgagaaccaagcttcaagtagcttacaagcgtgctactaacaatcaaaacgatttactgcaaaagttcactgcaaagctaactaatgattatgacgccatagttgttgagaatttagatgttaaaaagatgatgatgagccatgtagcttcaaagggtatgcacaggtcaatgtttggcaagtttagacaaatcatagcttataagtgcaaatggtacggcagagagctaattatagccaatagtttgtatccatctactcaaagatgtgctgtttgtggaactgttaaaaaaggtgaagataaaatcactttaaaaggcaacaagaagcatggtactaagaataatgagtttatctgttacaattcaaaatgccctaactataaccaaaaagttgaccgtgacgaaaatgccatgctcaacttaacaatgctagttgagcatccagaattaaataaagcattataaaagaaattgcgggcgaggctacgtccgataaagaagccaaaagagtcagtcaatgcgattactcctaaattggaatatcggaaaactgatgaagacgttggtaagaaaaatgcaaggcactatagaccataatgtatgtaaatcaaacacactgcatacattagcatacatttttcatagcacgttgagattctagatttatacgatcatcctgattttcagcatcaagacgctttgtatatggctgatgaaattcatccaactcgtgcgggttatctaaagaaatggttaccattatttgaagaaaaaataactgaaattttggcataaagaaagacctagataaattatctaggtcaaaattgaaattagtcaatgttattacgatacaagctaactaccttacccaaaattgtaactttaggtaaaatgattggagccattgtatcattttctggctgtaatcggtagtgatccttttctttgtagaaacgcttaactgtagcttcattttcttcagtcattgccaccacgatttcaccattgttggcagatgattgtttgcgtacgattacgctatcaccgtttaaaatgccagcgttaatcatactttcaccgtggactttgagcataaagagttcaccagcatcactttttaagtctggtgggagtggaaagtagtcatcaatatcttcaactgccagaattggttgtcctgcagtaaccacaccgataactggaatttcctttggcttgatacctaactcttttttaccttcacgggtaatttccaaagcacgaggttttgtagcgtcttttactagccagccctttctttcaaggcgagctaaatgaccatggacagtggaagtagaagaaagaccaactgcagaacagatttctctaactgtaggtggaatgctccgtttctcaactgtatcgtaaatatattgcaaaatttctagttgctttttatcgcttgtttttcttggcatttttaattctccgtttgtatttatggtacttaatattataacctaattctaccagataatgtcaatattctcaaacaggcgttcttaagaagttatactttttttatgacataaaatagggtagactaatgagtgttaatgtgaggtggaattattatggataataaagatgcaatgagcaaagaagaagaaaaaaaggtaactgatcgaatcaacgaactttaccataagaaagaaaaggaaggcttaactccagaggaagaagctgaaagaaaagaactacataagaaatttttagctaactttagagctgcctttaagcaagatgttgaaaacatggtcatcttagacaagaatggcaaggaagttacctcagaacgtgccaagcgagcacaaagaagaaaaggacttagaaaagattaattagttctttcaaaaagttagagaactatgataagatataaatgttagttagatggaggatttaatatgaatttaggtttagcaatttttttaattatcattgcgctcttgattggcgctgtagcaggtttttacggtgcaagagcttacatgaagaagtactttaaggaaaatcctcctattagtgaagatatgatcgttgctatgatgtcccaaatgggtcaaaagccttcaaataagaaggtacatcaagtaatgaacatgatgaagcaccaacaaaagtaattaatttaattagttttgttagaaaaggcgaaggatttccttcgtcttttttgtgcacttttaagaatgaggtgaaatatgggaatatttagtaagttagggtggttttttaaggctgagaaaaaacgttatatcataggcattacctttttggcgttaacttctttagctaacttggtaccgccccgtgtattaggcttaatggccgatcaattggatcaaggtcacatctcttggggacaatatggaatgttgatcattgctgtcgtggccgctgcattcacactttatattttgcgctatttttggcgtaaacaaatttggggcggcgcagcagaattagagcgccaaatgcgttcaaagttatttgatcattttatggtgatggatcggactttttatcagcgtcatcgaaccggagatttaatggctcatgctactaatgacgtttctgccattcagaacgttgctggtgatggcgttttaacattggttgattctttagttatgggactttcaacaatgattgccatgatcatttttgttgattggcgtttaactattgtagctttattaccattaccgtttttggcattgggagcttggaaattaggtgatcacttacatgatgcttttgataagtcacaggctgcattctctaagctgaataataaaactcaggaatctgtatctgggattaaggtgctcaaaacttttggtcaagggaaagaagatactgctgcttttgacaagatggtcgatgaaacgatcaatattaataaaaaagtttttgtctgggattccttatttgatccactgggaacaataattatcggtactacgtatgtgatcacgattatttatgggggactattagtaactaacaagattttatcaattggccagttggtttcttttatcgcgtatatttctaacatggtttggccaatgtttgctattggttatttgtttaatattctagagcgtggtagtgcaagttatgaccgtgtagaaaagttacttgatgaaaggcctttgattactgatgcacatgcagatccaaatattacttctcaagatttgcaaggtgaattaaaatatgacattaaatcatttgcatatccagatgagccagatattccagttttaaagcaagtcaatttcactttaaaacctgggcaaactttagggttagttggtcgagttggtgcgggtaaaaccacaattattcaactgcttttgcgagaatttgatcagtatgatggtcaaattactctgaatggaaaagatattagaaatattcaactaaaggtattactcagtcagatctcctacgttcctcaaaataatttcttgttttcaactagtatcggcaaaaatattgctttctcttctgaaaatgtagataaggatgatattgcagctgcagccaagaagagtgatttgcatgatgatgttttgcaaatgcctaaaggctatgaaactttagttggcgaaaatggcttatctctttctggtggtcaaagacagagaatgtcaattgctcgggcattgctaaaagatagtcagattttgattttagatgatgcattgtcagcagttgacgcaaagaccgaaactgagattttgtcatcattaagaaaagagagagctgataaaactacaatgatcgcggctcaccgtttgacttccgtgatggatgctgatttgattttggttctaaaggatggtcaaatcgttgaacgtggtaatcatcaacaactattagctgcagatggatggtatgcggaaatgtggcgtagacaggaattacaagcgaaagtaggtgaagatacagatgaataataacgaagaacagcatgaatctgtttggtctaaggcgataccatttaaagagcaagttgatatttttaagcgtttaatgggctttgttaagcaatttaaatttgaaatgattgttgctttagttggtgcatttattgttagtgtaattaatattcttttgccacgtggcttgcaatatttcttagatcactttctattgcatcaaagcacaacagtgcaggtgattttgtttgcaggttttctttatgctttaggctcaattttaaaggcaataattcagtttacttaccaatatttctttgctttaggatcagaaaaaacgctagagagtgtcagaagggcattgtaccgcaaactgcataagctagggatgcgctattttgatcaaactcctgcgggctcaattgtttctagagttactaatgatacgatgactttgagtaattttttgacggtgctatcaacttttgtgattggtgctttttcggtgattactgcgttattagcgatgtttactactaatatagttgctgggtggttgattttactctttattccgattttattattagttgtttggctttattcgcaaaaaagctcacgtctttatcgtaattatcgtgagcgtcttagtcgaattaacgctaacttaaatgaatcaattgaaggagtatcggttatccaagaatttaatcaagaaaaacggatgactaataattttgaaggcgaaaatggtggtttaatgaatacacgcttcaacatgatccgagtaaattcattgttattatcgccattgacatcgctgctttattcgttagctttagccatttcattaatgtactttggttttccattacgtgaaacttttgttccagctggtgtagtctatgccttttcacaatacatttcgcaactttttaatcctatttcaactgtgatggatcaaatgacctttttccaagatgggattgttgcaggaaagcggatttttcggatttttgatgatacccaatatgaaccacagcaggatgctcaaaaaggattgacgattactaaaggaaaaattgagtttaaacatgtaagcttttcttatgatggcaagcatgaaattttacatgatatttctttcgtagttaatccaggtgaaactttaggaattgttggtcatactgggtcagggaagagctcgattattaacgtgatgatgcgtttttacgaattcggtcaaggtgaaatcttgattgatgacgttaatattcgtaaatatcctaaagaagaattaagaaaaaaacttggcttggtattgcaagaaccgtttatgttttatggagatatttcatctaacattcgtttgtataataatcaaattactgataatcagattaaagacgccgctaaggcagtccaagcggatcgctttattgaaagaatgccgggtaagtatcatgctaaagtgattgaaggcggagaagaatttagtcagggacaaagacagttaatttctttcgctcgaactttagtcacagatcctaagattttggttttagatgaggcaacagcaaatgttgataccgagactgaaactttgattcagcaaggactaaagcggctgagaaagggtcgaacgacattagctattgctcaccgtctttctacgattgccgatgcggatcaaattattgttttagacaagggacgcataattgaacggggtacgcatgatcaattgcttgcacaaaagggttattactataatttgtataccttgcaaaataatgaaaataaaaactaattgtttttcaggacgtttgtgtagtagcaacgtctttttttgatataatagttaaaaagtattaaataattatgaatatttataaggagcaaaaatgaaaagatattttacagttcgtggtggagctggcgacgtttctaagccagacttaaatgctaagccacaagataacttatacttggctgttaactcagaatggctatctaaagcagaaattcctgctgataagacatctgctggtgtcaattcagagcttgaccaaaaaatcgaagatcgagtaatgaaagactttgcggacattgcggcgggcaaagaaaagatgcctgagattaaagactttgataaggcagttattttgtataagattgcaaaagattttgctaagagggatgcagaaaaagctaatcctattcaaaaggatttacaaaaattaatatccttaaataattttaatgattttaaacaaaaagctgccgatttgtttatgggaccatatgctttaccgtttgtatttgacgtcgatgccgatatgaagaacactgatgtaaacgtactccattttggtggcccaagcacattcttaccagatactacgacgtatcaaactgctgatgctaagcaacttttggatactcttcaagaccaaagtattaacttactgacaatgtccggtattggtaaaagcgaagcacgagtttatgttgaaagcgctttggcctttgatcaaaaattagctaaggtagttaagtcaactgaggaatggtcagattatgccgcaatttataatccagtaacatatgctgactttattaaaaaatttaaatcatttgacatggctgatttcatggattctattttaccggttaagccagatcgaattatcgttatggaaccacgttttctcaatcatgctgaagaattattgaatgaagggaattttgctgagattaaaggatggatgctagttaaatacattaacagcgtagctaaattattgtcacaagattttcgtgaagctgcgtttccttttggtcaagcagttactggtacgccacaattgccatcacaaattaagcaagcttatcgtttggctaatggtgcttttgatgaagtagttggtatcttttatggacaaaaatattttggggcaaaagccaaaaaagatgttgaagacatgatccaacggatgcttaaggtatatgaagaaagaattaatgctaataaatggctttctgctgaaaccaaaaagaaagctgtgattaagttaaaggcgttggttttaaaaattggttacccagacaagatcgaagaaatctttgacttattacaagttgatccgaaaaagagcttgtatgaaaatgaagcggcaatgtcaactgtacgaacgaaatatatgcttaataagttaactaagccagttgaccgttcagtttggctaatgccaggtaatttgaataatgcgtgctatgatccgcaaagaaatgacttaacctttccagctggaattttacaggcaccattttatgacattaatcaatctcgtggtgcaaattatggtggaattggtgcaactattgggcatgaagtatcacatgcatttgataatagtggagcaaaattcgacgaacatggaaatatgaacaattggtggactgacaaagattttgctgagtttaataaacgagttggtcaaatggttgatatttttgatggcttacaatatggtcctgctaagattaatggtaagcaggttgttggtgaaaatattgctgatctagctggccttgcttgtgtagttcaaactggggaaaatgatggggcggatttgaaagatttgtttgagaattatgctcgtagctggatgcagaaacaacgccctgaggcaattaagactgaagttcaaacggatgtccatgcgccacaaccaacgagagtaaacattccggttcaatgtcaaaatgcattctatgatgtatttaacgttaagccaactgatggcatgtggcttgatccagaagaacggattactatttggtaaaattgaataaaaaaatagtcactggatttcaatttctagtgactatttttgatatgtaattatttatcaagcatatatttacgagtcatcggtaaagttttacctgatggtccctttgtcaataggtattggataacgtcgatgttaccagactcgaaactagcagcacaagcattaaggtacatatcccacattctacagaatctttcaccaaatttcttttctacttcaggacgaacggcattaaagttcttatcccaaatttccaaggttctttgataatgacgacgaagagtttccatatcagtaatttgtaggcctgaatcgatgatgtcagtaacaatttctggtaagtagccaccagggaaaatatacttgtttaaccaagcattagtggcaccaccttgttgacgggtaataccatggattaatgcaacaccgtctttgttaaggtacttgtagacatcagcaaagtatttaggtaagttttctttaccaacatgttcaaaaattcccactgaagtaatgtaatcccatttttgatcaccaagttcacggtagtcttgtaatctaacttttgcgacatcttgtaagttatcgtcgtagattcgcttttgaactaatttaaattgctcctcacttaaggtaacaccggtgacttttaaaccgtattccttagctgcagtaagcatcagagttccccagccacatccgatatcaagtagggtcttgcctttttgtgggtggagtttgtttaagatatgatgtacttttgcaatttgagcttgttcaagatcatctttattgccatcttcgaagtgggcgcaggaataggtcattgttgggtcaagccacatcttgtagaaatcattaccaatgtcgtagtggctttgaatatcttcttcgctttgcttttccgtgtgtttttgcttaggcataaacttacggaacttagaagcacgcatgaatgaatcagcactttcataagcaccaacaagcaatttttggatattaccatgaatttcgatttttttatccatgaatccttcgcccaaagctagagaagcatttcgagtgatttcactcattggaatcttttcattaaaaacaatttcaatttcaggatcaccattgccataaacttcgctcttaccgtcccagtaggttaccttaacagaaaaggggaaagatttactaagcatcattttgtaaaaagttttttctaacaattgctttttcctccaatatttaaaacctaaaaattattttaacacttatattaaattgcacaggtaaagaaaaatcagtataaagcaatatttgttttatactgatttttacttatttagcaacgtagtggaaatttggatccatttccttatctaatttgttccaagcatcttcaagttgttgaaataaaatttgttcattttcatgggttagtttagttttacgatcaatggtaattggatcaccaaagttaacttctaatggcttgcgcttaagcagtcctttaaaagttaaagggccttggtagacaacaggtaccattggtttttttgacattttggaaattaataaaactccaccttttaattcagctgaatgtcgcgtgcctgaaggaaagataattaatgataactttccttctctaagtcccttaactggaatctttaaggctgatggtccagggttatttcgatcgactgggaaagcgtgagcatgatcaagaataaatcgtaaaaccggatttttgaataattcaattttagccataaacatgaattccattggactagcacctagtgcaaaaagcagtggttcccaccatgtacggtggggggctactaaaatataattgccctgaggcaagcgatccttatgatgaatgtgtatatgaccgtttaacacccaaacgatgaaacggacaatcggacgtataattttgtaaaacattgtctcctcattgattccttcatttgatgtaagctattataaaaatataatgacgagaaaggcaaatatttttatggtagatctgaaagataatgagcgaattgactacatgtatagcgataatcttcgtattattcaagataaaacggcttttagtttttcaatggatacattatttttagcatattgggctaaagacttgatccgtgataaagataaggttgctgatttatgtgcaggaaattgtgcagctacaatctatatggcttattttaatcgtgcccattatgatgcaattgaaattcaaaacgaagtttattctcaagcagttcgttcagtcaagcttaatgagatggaaaatcgtatttcagtttttcaggataatgtgctaaatgcaggacattttttgcggaaagatagttatgatgtagtaacagttaatccaccatattttaaagcacctaagggacatgaagttaatccagatcgtaaaaaagcaattgctcgccatgaacttttgattaatttagagcaaataattgaagtggctagtggcttacttaaaatgaaaggcaaaatgttaatggtacatcggccagagcgcttaggtgagattgcttattattgtatgaagcatgacttaagcatcaaaatggtgcagccatttgtgccacatcgcggtgaagatgctaatttaattattgtagaagccgtcaagcatactggaactgatggaactgttttgaaagatgctgttgaagttcatgaatcaaatggcgacttcactccattagtacagcgaatctcacgagaaactgcagatgacaaagctaaacatgaagcacagggtaaatattacttttatgtcttactgtgtaatgatggcagtttttatggtggttttactaatgatttagaacatcgtttgaaaatgcacaatttaggaaaaggagctaagtatactaaaacacggcgtcctgtacggatgatttatcatgaacagtttgacgataagcgtttagctttgaaacgagaatattggtttaaacatcattcacgtgcttggaaggaaaaatttttgcatgagcataatataaagttttaatccttgcatactgtaatcttttcttgtagaatatttgagtatgctgtgtcagcatatgaaacttaaaacacatcaagagcaatcatcatcgtggtgcccagggtagtggttagatgatgaaatgaacgcttgagaggatataaaaccataggaggaatttaaatatggcagacgttgttacaatgaagcaattgcttgaagctggtgtccactttggtcaccaaactagaagatggaacccaaagatggctccttacattttcactcaaagaaatggtatctacatcattgatttgcaaaagactatcaagatgttagatgatgcttacaactttatgaaggctgttgcccaagacggtggcgttttcttatttgtaggtactaagaagcaagctcaagattcaattgctgaagaagcaactcgtgcaggtcaatactacgtaaaccaacgttggttgggtggtactttgactaactggtcaactatgcaaagccgtattaagagattaaagcaattaaagcaaatgtcagaagatggtacttttgatgttcttccaaagaaggaagttgctctcttaactaaggaaatggacaagcttgaaaaattctttggtggtattgaagatatgccaagaattccagatgtattgttcgtagtagaccctaagaaagaaaagattgctgttcacgaagctaacattttgggtatcccagttgtagctatggttgataccaacactgatccagacccaatcgacgtagttattccatcaaacgatgacgctattcgtgctattcgtttgattgctggtgctatggctgatgctgttgttgaaggtcaacaaggtcaagatgatgaatcagttgaagttgacttcaaggaaaatgcagacggttcagaagaaatcgttagcgctgaagaaaacccagaagactagattttactattagttccgtaggaggatctattaatggcacaaattactgcaaaattagttaaagaattacgtgaacgtactggtgctggcgttatggacgctaagaaggcattagtagaagttgacggtgacatggataaggctgttcaataccttcgtgataaaggtatggctaaggcagctaagaaggctgaccgtgttgcagctgaaggtttaactggcgtttacgttaatggtaatgtggcagctattactgaagttaactcagaaactgactttgtttctcaaaacgacaagtttgttaacttggtaaatgaagctactaagactattgctgaaggtaagccagctgatatggaagcagctaaggaattgaagatggctgatggtactactttagaccaatcattcgttaacgcaactgctacaattggtgaaaagattgttttacgtcgttttgctttagaagaaaagaatgacgaccaagaatttggtgcttaccaacacaatggtggccaaattggtgttatcactgttttagaaggtgcagatgctgcaactgctaagcacttggctatgcacatcgctgctatgagccctaaggttatttcaccagacgaattagatgatcaatttatcactgatcaattagctgtgatgaaccacaagattgaccaagacaatgaaagtcgtgcattggtacataagaaaccattacctcaccttgtttacggttcagctaagcaattaactgatgatgttttggctaaggctaaggaagacatcaaggctgaacttaaagaagaaggtaagccagaaaagatttgggacagaattattcctggtaagatgcaacgctttattgatgataatactcaagttgacaagcaatttgcagtgttatcacaagactacattatggacgatagcaagactgttggcgaatttttgaaggaaaaaggcgctaagttagttgctttccaacgttacgaagttggcgaaggtatcgaaaagaagcaagaagacttcgctgctgaagttcgtgaacaaatgaagtagtcattattacataattatcatagaaaggaggagtacaccgtgtgctccttctttttttgtaaaaattttgtagtgttttaaatgttaaaagacattgcggcattagatatggtagaataattaaagctattagaggaggtcattatgagtcaagttaaatataaacgtgtcattttaaaaatatcaggtgaagctttagcaggtgacaagggtacggggattaatcctactgtaattggtcacttagctaaagaaatcaaatcagttcatgatttaggtgttgaaattggtatcgtctgtggtggcggtaacatgtggcgtggtgaaactggcgctaagttgggtatggaacgtgctcaagcagattacatgggtatgttagcaactatcatgaatggtttagctttgcaagatggtcttgaaaaaataggtgttcctactagaatgcaaacttcaattgaaatgagacagattgcggagccttacattagaagaagagctttgcgtcaccttgaaaagggtcgtgtagtcatttttggtggtggtactggtaatccatacttctcaactgatactactgcagcccttcgtgcagctgaaattggtgctgatgtaattttgatggctaaaaacggtgttgacggtgtttactcagctgatccaaagactgatccttcagcaactaagttctcagaattaactcaacttgatttaatttcaaaagacttgaaggtcatggatagaactgcaagttcactttcaatggatactgaaattccattaattgtctttaacgttaatactccaggcaatatcaagaaggttgtattgggtgaaaatattggtactgttattagaggtgataaataatgaataacgaaactattgaaaaagcaaaaactaaaatgacggattctattaaggtttatcaaaagagattagcttctatccgtgcaggtgttgctaacgctgctcttcttgataatgtccaagtagaatactatggggcaccaactccattgactcaaatgtctagtattaccattcctgaaccacgtgtattgcttattactccatatgatcaaaattcattagatgatattgaacatgcattgttggcttcaaacttaggattaactccggcaaatgatggtaaggtaattagattagtaatccctcaactcactggtgaaagaagagaagaaattgccaaagaagttggaaaatttgcggaagaagctaaaattgctgtgagaaatgttcgccgtgatgccatgaatactttgaaaaaagatgaaaagaatggtgatattactgaagacgaacaacgtaacttagaaaagcaagtacaaaaagtaactgatgatgctgctaagcagattgaccaacttgctgatgaaaagcgtaaggaaattactcaaggttaaagatgagtaataaggataatgaattaaatcatttagccattattatggatggtaatggacgttgggcaaaaaagaggcatagacctcgttttgttggccatcgagagggaatggataatgttgagcggattactttagctgctgataaattagaaattaaagttttgacactttatgctttttctactgagaattgggctcgtcctaaagaagaagtagcttacttaatgaacctccctgttcgcttttttgataaatacatgccaacattgatggaaaataatgttaaggtaaatatcatgggctatttggatgaattgcctgaaaagacttatcgcattgttcaacgtgcaatgtcagagacggccaataatacaggcttaattctgaattttgcttttaactacgggtcaagaagagaaattacgtctgctatgcaggagctcggtggaatgattgaagctggttcactaaaaagcgaagaaattactgaaaaaatgatttcagaccatttgatgactaaaaactttggtccatatcaagatccggatttattaattagaacgtccggtgaacagcgaatttctaatttcttattatggcaattagcatattcagaacttgcctttagcgaaaaaaattggccagattttgatgaaaatgatttaaaaaaatttgtagaagattataagcaccgtaaccggcgctttggtaaagtagacgaatcggatagttaaatatgaaacaacgtacaattacggcaattattgccttatgtctttttattccaattgtgctcgcaggtggcctttggatggattggctgactgtattattcgcagcagttggcattagcgaaatctttttaatgaagaaacaaatcttagtttcttttaattttttgttagccttacttgcaactttaacctggacagttccagactcattctttaaagtatttccttcaaatatcactaaattaggtgtgttttatggaattattatgttgttcttgacctggactgttctttcaaagaataaaaccacttttgatgatgtaggtgtatatattttggctgcactttacattggaataggttttcactatatggcagccattagagcatacccacaaaacggtttagcattgctgggttgtgtttttgttgttgtttggtccactgatatcggtgcctacatgattggacgtaagattggaaaacataaattatggccagttattagtcctaataaaacatgggagggctcgatcggtgcagttgtttgtgccttaatttgtagtgccatctatatggcaattcttggcagcttgggtattaactttggtgtatctgaattaacgatgattattctggcctttttcttatcaattgttggtcaaatgggtgatttagttgaatcagcttacaagcgtttctatggtgtgaaagattccggaaagattttgccgggtcatggtggtatcctggatcgctttgatagtatgctgtttgtattgccagtagtggctacaattttaggtattgttcattaggagaattttttattgaagggtatactaatctttatcgtcgtctttggtatattggtatttgtccatgaatttgggcattttatcgtagccaaaaagtcaggtattttggttagagaattctcaattggaatgggtccaaagctttttcaaattagacgtaaccccaccacttataccattcgttggttaccacttggtgggtatgttcgtttagcaggcgctgacgatgaaagcaagctggatcctggtatgacggttgttttacaattgaatgaacaaaatgaagtagtgagaattgatgcttcagaaagcgaaataccaattgaaggaattcccgttcaagtaacaaaggctgatctagtagacgatttaataattaagggttacgaaaatggcgatgaaaatgatccagtaacttatcacgtagctcatgatgcaactattattgaaaaaaacggaactgaattaattattgcgcctcgagatacacaatttaatcaagctaatgtttggcaaaagttggcaactaattttgctggaccttttatgaacattcttcttgggtttgtagtatttttaatctggacatttacagttccaggtccagcaacaactacagttggatcaactcaggctaattcaccagcgcgtgatgcaaaaattgtgactggtgatcagattgtggcaattaatggacaaaagattaataattttgatcaagtgtcacagcagattaatcaaagtaaaggcaaggtattacactttgaattaaagaaaaatggtcaaattaggaaagttacagttaagccaaaagctcataaaattcaaaaacaaacagtttatcaaattggtattgtagctaagagcaatgagaatgcagttgttaaattaaaacgtggctgggatacagctatttcaactaccggtctgattttcagagccgtaggtaacttatttagccactttagtttgaataaattatcaggtccagttggaatttattctcaaacttcacaagtttcacaaatgggctttacttatgtattagcctttttaggaatgatttcgattaatttgggaattgtcaatttaattccaattcctgggcttgatggtggtaaacttttattgaacttaattgaattagttcgcggtaaaccgatttctgaagaacatgaggcaattgttgaattaattggtttcggcttattattagttttaattattgcagttacaggtaacgatatctatcgctattttattaaataattatattttttactttaggagataagaatgcgtcaatcaaaattttttatgccaactttgaaggaagcaccatcagatgcagtggctgaaagtcataagctgatgattagaggtgggtatattcgtcaagtcacagctggagtttatgcttatcttccattaggctaccgtgttttacgcaaggctgagggaatcattgaacaagaaatggataaaattaatgttccagaaatgattatgcctcatttacttcctgcaactttgtggcaagaaagtggccgttacaagaaatatggtgcagaaatgttcaagttaaaagatcgtcatggacgtgaaagcttgcttggacctacacatgaagaaacttttaccgaaattattgctaagaacttaaagagttacaaacaaatgccacttgctttgtatcaaattcagactaagtttcgtgatgagaatagacctcgttttggccttcttcgtgggcgtgaatttgtaatgcttgatggttacagttttgctgcaactcgtgatcaattggatgaacaatttgatgatcaaaaaaatgcatataagcgtatctttaaacgtgccggtgttactgttcaccctgtaattgctgactcaggtacaatgggaggtaaaaactctactgaatttcaagcccctgctgctatcggtgaggatacaattgctactaatgaaaaaggaacatatgctgccaaccttgaaatggctaagagtattgatactttcaagcaagaaccagaagatgctaagcaattaactaaggtagctacgccaggctgcgatacaattgaaaaattagctaaattcctcgatgtaccagctactagaattgttaaaagtattttatacattgctgatgaccaaaaagttttagtattaatccgtggtgacaagcaaattaatgaggttaagttgggtcatatccttgacgctgatgaggttcatgaagcaaatactgctgatttaaaggaaatcactggtagtgaaaagggtggcgttggtcctgttaatgcagattgggctgataagattattgcagatgaaactgttaagaatctttacaacgttgtagttggtgcaggtgaaaccgattatcaatttgaaaatgctaacttagaccgtgatttcaaggtggatgaatttgctgatattcggactgctaacgaaggtgaaccagatcctgttgatcatttaccgcttaagttcactacttcaattgaagttggtcacattttcaagttgggtacttattacactaagaccatgggtgcagatttcttagatcaaaatggtaaagcaaagcctgtcatcatgggttcatacggtattggcgttactagaatgttatcagcagctgttgaacaacacttaactgaacgtggtgttgcatggccaaaggaaatcgctccatttgcaatacatattgttcaaatgaagatgaataaagaagatcaaactgaattagctgaaaaacttgaaaagaaattcagtgaaaagtatgatgttttatacgatgatcgtaaagagcgtgctggtgttaagtttgctgatgcagatttagtcggtgcaccaattagaattacgattggtaagaaggctgctgatggcattgttgaagttaagcgaccaactgatgacaaagcaaccgaaatgtcaattgatgaattagataagtttgtaaatcaagagttaggataatttttgtggcaaataaaaacgatcttttcttaaaattgctcaaacaggttcaatttcctgatagttttgaagacaatgcgcttctacaaaaagggaaaattgaaaacgtggatgtttacgctaaagaacacaggtgggatatccacgttttttttgatactcccttgatgtatgacacctatgtagcattaagaaaagctgtagaagaaactttttcttcttttgtaaatgtaagattttatgttggaacagctgatggttctgatcaatatttaccagattattggcattatgtagttcaaaattcaaatattttgcaacctgtggctcgtgaatttttggctggccaaaaacctaaaaaagttgatggccgctgggttattccagttgataataatgtgattgatggtttaattgagcagaaggctttagatgatttagctgaagagatgcgtgattatggcttctttaatttgaaatttataactcagctggatcagacaagttctaaaaacaatttagaaagtttgcaggagttgcaacaagagcatgaaaaaagcatgcaggaagtctttgagaagacgccagacaaacctaaaccgcaacaacctaaacagtatccaactagacgtactaattatggtaaacgtaaattagatgaaaatgctccaattacacaaattaaagagctggaagatggcgtacgtaatgtagtaattgagggaaatatttttaatgttgaaactcgtgagcttaaatctggtgcaatcattttttctggcgaaattacggattatagtgattcaattgcatttaagaaatttgtttctaataaagatgaaattgaagagctatctgcaattaaaccaggaacttgggctaaaatgcaggggtcagttgctgatgatcaatatatacatgatgtagtttttaatattagtagcttagagactgtcgagcatgttgggcgaactgaaaaatacgaaggtgagcctaaacgagttgaactacatgttcatactaatatgagtcaggttgacgcaactaatactccgacggactttattaaaactgctaagaagtttggacaaaaggcaattgcgattaccgatcatggtgatgttcaatcattccctgaagcatatagcagtggtaaagcactggacatgaaaatattgtatggtgtagaagctaatatgattgatgatcatgctttactagttttgaatcctgcaccgatgacctatgaagaccgcgagtttgtaatttttgacgttgaaactacggggttgtcatctgtttacgacacaattatcgagattggtgcggttaagatgaagaacggagaagtgcttgaacgctttgataagttcattaatccgcaccatcctttaagtgagcaaactattaatttgacttcaattacagatgaaatggttggcgcagccgatgatgaagcagttgtcattaagcaattccaagacttttatggcgatcgaccactgtgtggacataacgttcaatttgatgttgggtttgttaatgcagcattaagacgtgcagggctaaaagaaattactcagccagtagttgatacacttgaagtatcgcgtttactacatccagagcagagtcgccatactttagattcattagctaagaagtataatgtttccttggaacaccatcaccgggcaaatcaggatgctgaagcaactggctatttaatgtttaaattgttagatgcttttaataaaaagtatcatgaaaataatttgaataatttgaatggctatgcagcacatggtgaagtttataaacgagcccgtccttcccatatgacagttttggcaaaggatcaagctggattaaagaatctttacaaattagtatcaattgccagcacgaaggactttttccgtattcctcgtacgccgaagtcagatttggctcgtttgcatgatggtttactttatggttctggttgttggcaaggcgatgtctttatcgcaatgatgcaaaaaggttacgacgaagcaagagaaaaagctaaattttatgattatcttgaagttcaacctccagcaacctattcgcaattaattgctgatggtttgattaaggatgaagatcaattacatgaaattattgaaaatattattaaattagggaaggaattaaataagcctgtagttgcaactagcgatgcccactacgttgaccaaaaggacgctatttatcgtaaaatcttgattgcggctcagagatcaaaccctagtcgaaataagccacagccagatttgcatttctattcaacacaggaaatgctagatgcattttcattcttaggcgaagatgtggctaagaaaattgttattgacaataccaataaaattgctgatgaattgtcagaaattcagccaattaaagatgggttatacccaccacatattgaacatgccgatgaagaaatgaagaagttgacctatgataaggcttatgaattatatggtaagccattaccgaagattgttaaggatcgaatagatttggaattaaattccattatttcgaatggttatgcggttatttacttgatttctcagcgtttagtagctaagtcaaataaagatggctatttggtaggttctcgtggttctgttggctctagtctagtagcaacgatgtcaggaattactgaagttaatccgttagctccacactatcgttgtcctaactgtaagtattcacaattctttgaaaatggggaatatggttctggttttgacttgcctgataaagattgtccaaaatgtggaactccattagttaaagatggacaagatatcccatttgcgactttcttaggatttcacggcgataaggttcctgatatcgatttgaacttctcaggtgactatcaaccagtagcccataattttattcgagtaatgtttggaccagataattcatatcgtgctggaacgattgcgactgttgcggataagactgcttacggttatgctaaacactacgatgaagagcatgatttaaagctaagaaatgcggaattagaccgtttggcagctggtgtccgtggtgtcaaaagaactactggtcaacaccctgcaggaattgttgtagtgcccgatgatatggacatttacgattttacgccggtatcgtatccagccgatgatgtaaatgccgcttggttgattactcactatgacttccactctattcatgataatattttgaagtttgatattctgggacatgatgatccaactatgattcgtcacttgcaggatttgtctgggattgatccattgactattccacccgatgaccctggagtcatgtcattattttctagtcctgatattttaggtgttactccagagcagattcaatcagaaactggaactttgggtgttccagaatttggtacccgttttgttagaggaatgcttgaggagactaagccaacgacattttctgaattattacagatttcaggtttgtcccatgggactgatgtatggctaggaaatgctgaggacttaatcaatcaaggaatttgcaaactgaaaaatgtaattggttgtcgtgacaacatcatgatggacttaattcactggggcgttaagccagaagttgccttttcaacaatggaatccgttcgtcatggtcgtggcatcagcgatgaaaatatggctattttaaagaaaaataagaatattccagattggtatattccttcttgtctgaagatcaagtacatgttccctaaggctcacgctacggcttacattttaatggctctacgaattgcttggtttaaagtatattatcctgaaatctattacacagcttacttttcagttcgtgccgatctatttgatttggttgcaatgagtcatggtaagaatactgttaaggctgcaatgaaggaaattcaggataaaggaaacgatgcatcagctaaggataagagtttgatgaccgtgctagaaatagctaatgaatgtctagaacgagggattaagatcaaaatggttgatattgatcaatctgaagcaactgactttaagatcttagataagcatacaattttagcaccgttcaatgctgttcctggtttgggggataatgcagctaagcagattgtagctgctcgtgcagaaaagaagtttttgtctaaagaagatttagctaagcgcggtaaagtatcacaaacaattatgaattatttcgaagaaaatggtgtcttggaagggatgccagatgaaaatcaattatcacttttctgatagttaaattttacaagatcaggtaaaacatggtatactacgtatgaagttcgaataggtaaattcgagtgagcagtgatgctcactctttttattacggaggaaaatttttgtctaaagttatagattctgttcgtccagttgtcgaaacaattattgatgaacatggtgacatgttggttgatatggaatacgttaaagaaaaagggcaaaattatttacgcatttatgttgatcgccaaccaaacggtattgacattgatgagattgcagctttaagtgaacttgtttccgaaaagctggatgctcttgatcccgatccacttccagatccctatgttttggaattatcatctccaggggcagaacgaccaatcaaaacaaaagctgattgggaaaaagctctgaatgattacattcatgtcggtctttatcaaaagattgagaataaaaaaatgtatgaaggtacactcaagtcttataatgatgacgaagttgtattagaaataaaagataagacaagacgaaaaacattaactgttccccgtaagttaattgcaaatattcgttttgcaattgaattttagaaaggttgatcaaaaacttatgtctaaagaaatgctagaagcgtttgctactttggaaaataccaagggcattaagcaagatgttattgttgatgcaattaaagccgctttggtagctgcatacaaaaagaattataatcaagcacaaaacgttgaagttgattttgatgaaagaaaaggtaacttcaaggtaatggcagttaaaactgttgttgacgaagtgcaagatgaccgtcttgaagttagtttaaaggatgctttaacaattaatcgtgcttatgaagtaggcgacgaaattcgttttgaagtaacacctaaaaattttggtagaattgccgcccaaactgctaagcaagttatcatgcaacgtctacgtgaagccgaaagaaaacatattattgatgaatattcacaatatgaagatgaattggttactggtaccgtggaaagacgcgacaatcgtttcgtttatgtaaagattggtaatgttgaagctgttatgcctcaccgtgatcaaatgccaaatgaggtttacaatccccaagaccagattcgtgtactagtaactcatgttggctccgatagcaagggtgcacaaattacagtctcaagaactgctcctgacatggttaaacgattgtttgaacaagaagttccagaaatttatgatggaaccgttgaaattgtttcaatcgcacgtgaagcaggtgacagaactaagatggctgttaagtcaaatgatcctaacatcgatccggtaggtacctgtgtaggccaaaagggtgctcgtgtacaaaatgtagttaacgaacttggcggtgaaaatattgatatcgttaagtatgaagaagatccatctgactttattgctaatgcattaaatccagcagaagtgattgcggttcaatttggtgatgatgaagaagaaaaaagtgctttagttatcgtaccagattaccagttatcacttgcaattggtaagaaaggtcagaacgttcgcttagctgctcgtttgacaagctataagattgatattcgtcctgaatctgaagtagaatttgtagatgaaaaaacaaatgatacagctgatgctgcagatagtagcgaaacttctgaaaatgttgaaagtacagatgacgctgctgacgttgaaagctcagatgatacaactactgtagaagattcaagtaaagaagataaaactgaagaataggtgattttttgaaaaaaagaaaaatcccaatgcggaaggatttattaaccgatacaatgcagcccaagaaggaattagtacgtattgttatcgataaagaaaaaaatgtgtcagttgatccaacaggtaaaaaggctggtcgcggcgcatatgtttcccttgatccaagtaagattgaagctgctaaagagaagaatgtattagaacgtagtttaggtgcgaaagttccagatactttttacgatgagctttactcttatgttgatcatcaaaaggcaagaaaagaattatttggtgataaataagattgcaaaatagacaaaaagcaattaatttgttaggtttagctgagcgtgctggtaagttaactaccggtacagagacagtcattaatgaacttaataagcacaaaatcaaagcggttattatggctagtgatgttcaagacaacacggcagaaaaagtaaaccgcgctgccagaaaagacaatattcctatgataactatgtttactgccattgaattgtcaaaggcaattggcaaaaaacgcaaagttttaggattaactgatgctggttttgctaaggcgttagttaaaaaaataaatgaaggagtgtgattggatggcaaagaaaagaatttatgaaatcgcaaaagaagtcggcgttgataacaaagttgtagtccaaaaagcaaaggatttaggcttagatgtaaagaatcacatgtcatcagtagatgattcacaggttgcaaagttaaagaatagtttccaaaactccgctcctgctgcaaaatcttctaataaaaagaataaaataaaaatctctgtttcttctattcgcaaaaatgaaaagaagcaagaagataataatagttctaagaattctaagagacgcaataataaacgtcgttcaaataatcacggtcatgagaataaaaatgatcgtagaaataatacaggtaagccaaaggcagctgctttgttacaacaatttaaacaaaagcaacgggcagaagaagggcaacttaatcgtgaagcccaaaaagccagaaaagaatatcatgagcaattaagacatccaaaacaagaacagccagtgaaagataataagaaaacaagcaaccacaaagataacaagaagaaagcagaaccagtagaaaagaaagttattggtcctaagattttaaagccttctccagctcgtttgaagaagcaacagcctgaagcgactaaagaactagttcaagttactattcctgaggctcctaaggaagaaaaacgcggcaataatcgtggtcgcaacatgggaaagccaggacgcaagggtaaaaatcaatttggcaatggtcgtagtgaccattcagatcgttcagagagaaagcggcgtaagaataaaaaacgtcaacaagagcaaaagccaaagaaaacacttactaagcgtaaggaacgtccattaccagaaacattagtttacgaagaaggtatgaacgctcaagatattggtaagttaattcaccgtgaaccagctgaaattgttaagaaactcttcatgcttggcgtgatgactaaccaaaaccaatctttggataaagatacaattgaacttttagctgctgaatatggtatcaatgctgagcaaaaagttcatgaagacatctctgatattgataatatctatgacaagagaatggaagagtcaaaggaatctaaaaaccaggttaaacgcccaccagttgttacaatcatgggacacgttgaccatggtaagaccactttacttgatcgtcttcgtcatactcatgtttcagctcatgaagctggtggtattactcaaaagattggtgcttaccaagttagattagatgatcgcttaattacattcttggatacaccaggacacgcagcattttctaacatgcgtgcacgtggtgctgaaattactgatattgttgtactggttgttgctgcagatgatggtgtaatgccacaaactgtagaagcaattgaccatgcaaagagtgctaatgttccaataattgtagcaattaacaagatggataagccaggtgcaaatccacaacacgtaactgaggaattaatgaaatacaatttgattcctgaagattacggtggtgatactatcttcgttaatatttcagctaagacaggtcaaaatgttgatgacttattacaaatgatcttgttgcaatctgatgtgatggaacttaaggctaatccaactgaaatggcaattggtactgtgattgaagctcgtttgtcacgtggtcgtggacctgtagcagacgttttaatccaacaaggtacacttaatgttggtgacccgattgttgttggtaacacttttggtcgtgttcgtactatgactaatgatcgtggacgtcaagttaagaaggctacaccatcagaacctgttgaaattactggtttgaacgatgtgcctgaatctgctgataagttagttgaatttaaggatgaaaagaccgctagaagtgttggtgaagctagagcacaacaagctttacaaaagtctcgtgaaaatgttcaacacgtaactcttgataacctcttcgatactatgaagaaggaaaacatgaaggaagttgacattgtcttgaaggctgatgttcaaggttctgtagaagctttacaacaatcgcttgaaaagattgaagttgaaggcgtacgtgtaaatatcattcactcaggtgtaggtgccattaatgaatcagatgtaactttggctggtgcatcaaatgcatttattattgggttcaacgttcgtcaaactgctactgctaagagccaagctgaaaccgatggcgtagatattcgtctttacagcattatttacaaggctattgatgatgttactgctgccatgaagggtatgcttgaaccaacttatgaagaaaaggttatcggtaatcttactgttcgtgaaacttggaaggtttctaaggttggtacaattgctggttccttcgttgataagggcttggttaagaatgattctaagattagagttattcgtgatggtatcgttaagtatgatggtgaaattgcttcacttaagagatttaaagatgatgttaaggaagttaagcaaggtaacgattgtggtttaacgattaaggactacaacgacattaaagttggcgacgaattcgaagtttacgaaatgcaacaagttgagcctaagtaattactattaggaggaaaacatgaagcatagaattggtcgtgttgaaggtgaaattctacgcgaattaaccaagattttacaaaagaatattcgtgatccgcgcttaagtggtgtaactattaccgcagttgaatgtacgaatgatctttcatatgcaactgtttattacagcctgctaactgaagatgagcataaggaagaagaggttcaggcaggttttgaaaaggcaaaaggcatgatgcgtcatttgcttggtcaaacattaactgtttataaggttcctgaattaatttttaaacgtgataattcagttttgtatggtagtaagattgaccgtttgattgcagaagttaagaaacaagatgctaagcgggaaagcaaataaaaaagagggcgccgtgatggtgccctttttttgttgaaaagaatagggaataattatgttaaacggaattttagttattgataaagataaagggatgactagtgcagatgtagtttatcatttgcgccgcgtattacatattagaaaaataggacatgctggtacgcttgatcctgaggtgacaggcgttttaccaattgctattggtcaggctactaaattaattgaaatgatgcatactaggccaaaagaatatattggcacgggactatttggttatagcacagatagttatgatgcaactggaactgttttaaaagaaaaaaagttgattcagcctttttctggtgcagaaattcaagaaaatatgaataaatttgtaggagaaattgttcaagtgcctccaatttattctgctgttaaagtgaatggtaaacatctttatgaatatgcacgtgaagagattgaagtcgagcgacctcagagaaaggttgaagtcaaacaatatgatctaactaaagaaccagtttttgatataaatactgggcaagaaagctttgattttaagattaaatgcagcaaaggcacttatgttagatcgttagttaatgatctaggtgaaaaattagattgccccgcaacgatgacttatttgagaagaacagctagttctggctttgatattacacaagcagtaaaattaaaggagattgaagagaatccgaaaaaggccactgaacttatacagccgattgatgcattttttaaggaatacactcaggttgatttaactgaagaaaagtggcttaaagttaaaaatggagcgggtatttcgcttgaaactaatgcgaaaaaagttgcactacgatacaataaaaaggtgaaagcaatttatgaaaaaaaaggaaagctttatcgcccaagcttaatgctgttgcaaaatgaataaatgaaatgaaggaattagctgtgaaaatcgttcatttaacatatcctgttaaggaaaatattttatctactagaattgtgcttgcccttggcttttttgatggggttcatttgggacatcagcgcttaattaatcaggctaaagaaattgcattacagaagaaattgtcattagttgtgttgacctttgatcgacatcctaaggaagtttatgagtcgaaacgagattttaaatacttagaaactttggaagaaaaagctaacaaaatggcggaattaggagtagattatttggctgttttaccatttactaaaaatttcagtcaaatttctgcacaagaatttgtcgataatgtaattgtcagattaaatgctgataccgttgttgctggctttgattacacttatggttctaagaatattgcaaatatggctaatttaccccaattttccaaagggcgttttaatattgtagtgatgccaaagcaaacttttaacggtagaaaaattggctcaactgaaattcgtcaagcaattaaggatggtcagatgaaattagccactgaattaatggggcaccattatgtaatgagtggtatcattgggcatggtaaacgaaatggtcataagctaggctatccaacagctaatttgatttgggcagaacataaggtgattcctaaaattggagtttatgctaccaagactaaagtaaatggtaagtggtataactccatgactagcgttggctataatgtaaccattaatcaggacaagaagatatatattgaatctaatatttttgattttaatgaagatgtctatggtaagccaatgaagatcaaatggtataaatataccagaggtgagaaaaaatttgccggattacctgaactgaaagagcaacttgaacgagatgagcaagaaattagggcttattttaagcaaaagggttaagaagctacgtactttgaaaaaagtgcgtattttttgaataaaattagcaatctacttgatttagtgctaatttctggtatcatattaactgttagcacctgagagatgtgagtgctaaaagtgagggcgatataatatgttgaccgagcgtcaagagcttattttaaaaacaataattacagactttacacaaagtcatgagccagtaggctcaaagaccgtaatgaagcagttgccaattaaagtttcaagtgcaacgattagaaatgaaatggccgtgttggaagagcaggggttaattgaaaaaactcactcttcaagtggtcgaattccttcaagcgagggctatcgttattatcttgataatttagttgagccgttgcaattaccagagtctgtttataatacaataggaagccaattagatcgaccttttcatcaagtaaatgaaattgtacaagaagctgcacgaattctgtcagatttaactaactataccgcatttgcggaaggacctgagagtcatgatgttagagtcacaggatttagaattgtaccgctgtctcaacgacagattatggcaattttggttacaagtgatggtaacattcaaaatcaggtatatgctttgccacataatattcacggcgaagaaattgaaaaggctgtccgcatgattaatgatcagttagtcggaaagagcctaaatgaaatcaacgtttcgttgctaagtgaattagctaaaaacgaattaggcggcgaacatgtgactgaattgcttagtttagttgaagatgtcgtaaaagatgcagctagtgagcagatgtatgtggatggacagattaatttgctcaataatacttctgaacatgatgtaaatgacattcgttctttgtacgagttgattgatcataataatctgttcactaatttaatggatgcaaaggtggatccaaagtctggaaattatccagtaaaggttaagttgggatctgaattacccaatgatttattaaaaaattatagtttgctgacagctgagtacagcgttggctcccatggtaaaggaactattgctttacttgggccaacgaatatgccatattcacaaatgattgggttgcttgaatattttagaaatgaactagctaaaaagttgcttgattattatggcaagtttcaataaaggaggttagccgtgagtaaagaagaatttccaagtgaaaaaaatctagagcaaaaagaaaagacttctgagcctaaggctaaaaaagaagccgataaaggtgaagaaaagaagcaagaaaaaaataaacaagatcaaaaattagctaaagaattagctgatttaaaagataagaacaaggatcttgaagataagtatttgcgtagtgaagcagaaattcaaaatatgcaaaatcgctacactaaagaacgtgctcaattaattaagtacgaatctcaaagcttagcgaaggacattttgccagcaatggacaatttggaaagagccctaagcgttgaggccgatgatgatgtgtctaagcagttaaagaagggcgtgcaaatgaccttggatgcacttgtgaaggcaatgaaagatcacggtgtagttgagattgaggctgatggcgttaaatttgatccgacattacatcaagctgttcaaacagtagcagctgagaatgatgatcaaaaagatcacgttgttcaggttttacaaaaaggatatcaatataaggatagaacactaagaccagcaatggttgtagttgctcaataagagaggaagctaatatatgtcaaaagttattgggattgatcttgggactactaactcagcagttgcagttcttgaaggtaaagaaccaaagattatcactaatccagaaggtaaccggactactccttcagtagttgcatttaaagatggtgaagttcaagtcggtgaggtagcaaagcgtcaagctattaccaaccctaataccattgtttcaattaagcgtcacatgggtgaagctgattataaggttaaagttggtgataaggaatatacaccacaagaaatttcagcatttattttacaatatattaagaaattctcagaagattacttgggtgaagaagttaaggatgctgttattactgttcctgcttacttcaatgatgctcaacgccaagctactaaggacgctggtaagattgctggtttgaatgtgcaaagaattattaacgaaccaactgcttcagcattagccttcggtttaaataaagaccaagatgaaaaagtcttagtatacgaccttggtggtggtacttttgatgtttctgtattgcaattaggtgatggtgtcttccaagtattgtcaactaatggtgatactcatcttggtggtgatgactttgatcaccgtatcatggattggttaattaagaactttaaggatgaaaatggtgttgatttgtcgaaggacaagatggcaatgcaacgcttaaaggatgctgcagaaaaagcaaagaaggacttgtcaggtgtatcaagtactcacatctcacttccattcatttctgctagcgaagctggtccattacaccttgaagcagatttaactcgtgctaagtttgatgaattaactgctgacttggtagaaaagactaaggtaccatttgacaatgcattgaaggatgcaggtcttactgttaatgacattgacaaggttattttaaatggtggttctactcgtattccagctgttcaaaaggcagttaaggaatgggctggtaaggaacctgaccattcaattaaccctgatgaagctgtagctatgggtgcagcaattcaaggtggtgttatctcaggtgatgttaaggatattgttttacttgatgttaccccattgtcacttggtattgagaccatgggtggtgtcttcactaagttaatcgacagaaacactactattccaacttcaaagagtcaaatcttctcaactgcagcagataatcaaccagctgtagatgttcacgtattgcaaggtgaacgtccaatggctgcagacgacaagactcttggccgctttgagttaactgatattccaccagcaccacgtggtgttcctcaaattcaagttaccttcgatatcgataagaacggtattgtaaatgtatctgctaaggatatgggtactggcaaggaacaaaagattactattaagagttcatccggtttatcagatgaagaaattaaacgtatgcaaaaggatgctgaagaacacgctgatgaagataagaagcgtaaggaagaagcagaccttagaaacgaagtagatcaattaatctttactacagataagactttgaaagatactaaggataagctctctgatagcgatcgtaagccagttgaagatgctcttgaagctttgaagaaagcccaaaaggacaacaacttggatgaaatgaaagaaaagaaagatgctttatccaaggctgctcaagacttagctgttaagttgtatcaacaaaatggtggtgctgctggtcaagctggtccacaagcaggtcctcaaggcccacaaggtggtaattcaaataatggcaacaacggtaatgcccaagatggtgaattccacaaagtagatccaaataagtaatgggtttataattaaacaaaaggagaaaagaactacccattgagtagttcttttcttttgagaatacaaggagttcaaatagatggcacaagaagattactataaagtacttggcgtagatcgtgacgccagtgatcaggaaataagtagggcatatcgtaaattagccaaaaaatatcacccagatttaaaccatgaacctggagctgaagaaaagtataagcaggttaacgaagcctatgaggttttgcatgataagcaaaaacgtgcgcaatatgatcaatttggttctgctggtgtaaatggtcaaggtggctttggtggtggagctggtcaaggctttggcggtgccggatttgatacttctggctttggtgattttggcgatatctttggcgatatttttggtcaaggccgtcaacagagggttgatccaactgcaccacaacgtggccaagatttggattatcaattgacaattgattttatggatgccattaagggcaaaaagacccaggtcagctatactcgaagcgaaacttgtgaaacttgtggcggtaatggttgtgaaaaaggtacacatccaattacctgtgataaatgtcatggaactggttatatgacaattactcaacaatcaatgttgggcatgatccgtcgtcaaaccacttgtgacaaatgtcatggtcgtggtgtgattattgagcatccatgtaaaacctgtggcggtaaaggaacagttgaccgtaagaatactattgaagtggatattccagcgggaatcgacaatggtcaacaacttagatatcaaggccaaggcgaagcaggtataaatggcggaccatatggtgatttatatattaactatcgaattaaaccatctaaagattttgagcgtcgtggccagactatttatacagaagtaccaatctcatttgctcaggctactttaggagatgaaattaacgttaagactgtgcatggtgatgtaaagctaactattccagctggtacgcaacctaataagaagtttactttgcgtggacagggtgtgccatatcttcgtggtaatggcaatggtgatcaaattactacagttaatattgttattccaaagcacattaatgataagcaaaagaaagatttgaccaactttgttcatgatggtggtggcaatattacaccacaagaaaaaggattttttgaacgcttaaaagataagtttaatatgtaaatgctaaaaaggtttctgctacttgcaacagaaaccttttttaagatcaattaattttttggtgatttttagagtttttcttggaaaatattcaatgctgaattttcaattattattctaaaaactctgcattttattgaaaatttactatgctacaatttcatcatttattctagctttgctataattaatacatagtaaagggtgaacgattttatggatttaaaaaaattaaaagactatcaaaaacacattcgaaattttgctattgtggcgcatattgaccatggtaaatcgactattgctgacagaatcttagaattaactgatacagttagtcaacgtcagcttaaaaatcagatgttagatgatatgccacttgaacgtcaacgtggtattaccattaaaatgaactcagttgaagtgaaatatcatgctgaagacggtgaagactacattttccacttaatcgatacaccaggacacgttgacttttcatatgaggtatcacgttctctagctgcctgtgaaggtgctttaatggtggttgatgcttctcaaggtgtacaggctcaaactttggctaatacttatttggcaattgatgatgatttggcaatcttgccagtaattaacaagattgacttaccatctgccgatgttcctaagactaaggaagaaattgaagaaatgttaggttgggatgcttcagaagctgccgaagtttcaggtaaaaccggtcaaggtattaaggacatgctggaaaaggtagttaaagatattccagctccgtctggtgatattactgctccattaaaagcattgattttcgactctaaatatgatgattatcgcggagtggtaatgtctgtcaaaattgaagatggatctattaaaccaggcgatcgaattcaaattatgaatactggcaaggaatatgaagtcacagaggttggtgtttctagtcctcatccaattaagaaggatattttaatcgcaggggatgtaggatatattactgctaacattaagtccgttcgagaaacacgtgttggtgacacaattactcaagctgataacccaacggctgaaccacttccaggctatcgtcaaattccaccgatggtttattctgggatgtacccagttgacaaccgtgattatgaagatttgaaggaagctttacaaaaactacagctgaatgatgcagctttagaatttgagcctgaaacttcaacagctttaggctttgggtttcgttgtggcttcttaggcttacttcatatggatgttgtacaggaaagattagagcaagaatttgaccttgatctaatcatgacagcaccatctgttgattatcatgcaattatgaatgatggaacaaccaaggtgattgataatccatctgatttgccagatgctggtgaatataaggaagttcaagaaccttatgtaaaagcggaaattatggtgccaaatgattttgttggtccagtaatggagctttgtcaacgtaagcgtggtgaattcgttaccatggattacttggataagtaccgagttaatgtaatttacaacatgccattagctgaaattatttttgatttctttgatgatttgaaatcttcgactaaaggttatgcttcacttgattatgaaattacgggttatcgtgctactgatttggttaagatcgacattttgcttaacaaggagccaattgatgcattgagttttattgctcacagatcagaagctcaagatcgtgcccgtcaaatgacttcaatgctaaaaaaactaattccacggcaaaactttgaagttgatattcagggcgcaattggagctaaaattatttctcgagctacaattaagccataccgaaaagatgttacctggaaaatccatactggtgatccagatcgtcgggctaagctgcttgaaaaacagaaacgtggtaagaagcgaatgaaagcagttggtagagttgaagtacctcaagatgctttcatggcagtcttgaagatgaacgatgatgacatcaaaggtaaataagatttgctagcattcccaacctgacgcggtttgtcgtcactctgagaatgctttttttgcttttctactgaaaatctactgaataaatatctttaaaagttcaaattatcaattgatcctttaatatctttcttttgttttttagttacgtgtgtgtaaatttccatagcagtcttagaagttttgtgcccgagaacgtactgaacatcttttggagtaattctttcattaccgtcataaagtagtgtagcaagagtatgacgcagcccgtgaggggttatcttacgtaaaggctcttttttatcgttgggatgttccttattccatttttcgcattgctttttgtcaaacttatacaagtacttcaaccaaaagtcaggctgctgtgcccaattgtagctaccgtctttggtgtgaaaaatccattcacagtggtcaccgatttcatcgcaatattcgcggtattctttcagaatcatataaagattgtctgacatagggactgcatggtgaactccatttttaacgtcatcaatggtctttttgccgttatcatctttggcgacagttcgctcaatttttacaactcgtttgtcaaagtctacatctgaccatttgagtgcaagagcttcaccacgacggcatccaagagatgcaactgtgagaaaataagtatatttcatgcggctataatcacgggctatatcaagaaaatgtttgagttcgtccaattcgtagaaattacgtgaattatctcgactagattttgctgactttttgggcatgattacgaagtcaaaagggtctttactgcaccagtgacggaagatagcatatttgataattctgtgtaactgattgacaattgacttgtaagttacatattttgaagcaagatcattaacatatttttgtacatgatccggtgatatcctgtctatgtaagtatcaccaaattctggctcagtatgatttttccatgtgtcctttaagcgtcctagtgtggaaccacgcacatcttgcttcattacttcaagccatacattatatacatagcttacagttatcttcttttgagctgtttctatcttttgacttaatgcacttggtccttgtgcctttaaattgcgacgaagttcctcggcttctttgcgggatttgagtttgcttctggtaacgtttataactttaccagtttcaggattaataccgatgtaagtcctaagtcgaaaatactttttcccgttttttaatttatactctgtaatttcagggtcttttttacgagccataatatcattcctttctaaaaatatttgatgatgcgcgctcggcacgagcgcgcatggggcgcccgcgggttagattatctcttgttgatttcatgaatcaaaagaagtaatattattaatgtcaagtttaattcgttcatgtttttcacctccaaggtggagaacaacacaagcttgcttgtgttagacttggaaggtgacaaaacatgagtgagcgggcgccccaagagctttactcaaagggatgcaccgtataagaagcgttgctgtgtcggcaatgcttcttttttgctataatgaattaaaaaaggtggtaacagtatgaacgataatgatttctttgtagtcagttacaaaattcttagctatttaaaatattgctatgaaaatgataagagagtagatccaactattttgagtgaagggatgctctcaatttcaaacaatcaattcttgaaaacactaaaaatgttaattgatcaagggtatattgacggtgtgtatgtaaagcaaactcttgatgggatgttcgttttaaacaatcgtagtaaggcagcaattactatgagtggtttagattatttgaaaaatgatcgctctatgaaagaagcatttgaacaattgggaccagtacaaaagtggttgccaatcatcaaataatttaaactgatgttctttaataccgtaaaatcaaagcctacacacctgaaagggtggcaggcttatttttatgcgtttctaaaccatctagtagatgatcctttgacaatatgagtgcctcgacctaagtcgcctcttacttcgtaataatgattattgccgaaatatctaacatcgacgtaggatcctttggcaagccagaagctaaacttaggtgctttataaagcggatatcttaacttatatacttttacgtctttggttgttttaacttcatgccaatgccacgaatgtttactgatagcttgcacgggttgtgccgtaactgctgagactgcacctgtaccaccgagcaacatgatagatgccattgctgtaactaaaaatctatgtttcatatatctatatcctccaaaatagatattgccttaggtttatagtcgctggcgttgtagactttgatataatgaatgaaaaggaaataggcaaatgaaagatgacattgaaactattaaattatatgtaaaaatcatattttacgaagtcaccatcatgtttggctggtggttgtggaatattctgggaatattgccatttcactgattccagcctaactcgtgacttaaccatgctataattaatgggataactattaatgtaatcacacttcaaaagatttttttgattttgccgttaatctttgaagtgtgtttttttatataatcttgacctttatcagtaatgtaatagccggtaatagcagggtgaccgccaacgaatccctcattgatgtctactaagccttgctttttaagttttaacaccatcattacttcatcattattgccattaagtgcagcaaaagcatctttattttttagctggtgcacctcacaatcactgatagacttcaaaaattctaaaatgtcgttcatatatttcacatcctttccagccgcgcgtgcggctttttctaatattccgacagcccaccatgaggcgggttgtttttgtcgtaatttataactaagttgaatatcttgaaatcgttgtctaaaacgttgaatacgtcttgcttgtttccagattcttccgcacttagtaatgctaaacctattcgatcatcacaggcgaaaagctcgggcgactcaacatttttcaaagcttcctcagcttcactttctgtgtagtcaagatagttagttaagattcttatagtagatttatcttcaatctgctcatataaacgagcaataaggtaagttaagtatctaggtgtgtaatcatcatgcatatttatgtctccttaactatgcaatatcagcaagtaggtaataacattccttgggaattgcaaaacttctagcaaactgataaatgctggtgaagtggaattcattttcaatgcaatactgttgcaataacttgatagcaaagaagttttcttgcgcttcacctttacgattagttatgtcgttcaaattaaagtatgattcttcctcgtgtagtacatgtccgatttcatgagccagcaaaaaaggagtgtgagtaggaaaagaccatctagaattcataattattaatctgccaggttcgttatagctaactgatggagcatagggcggtaatttataagtaaactcgataccaatgtgatgatcaaaagcgtaattcattagataccgcatcaatctgtcatagtttgagcgtgtctctaatgacatttcttctatattagtcatagaatcactcatccttatttagcatttcagggtgacgcttgaagtagccctttgctatatccgcataagtgctttttaattcgtcaggtaatttgccaccgtagggcatcggcatgtccagatctgaccatgtgagagcagtgccatcttttgctgtgctttctgaactaggattatctgattttccagttaagtagtcagttgtagtttcaaataatgctgctatttgattaagcatttcataatcaggctcatgcagatcatattcccagttagagtatcgttgtgcactaacaccaagcatttgagcagttttagatttactccatccttttgagtctcttaaattctttattcgttggctaaaagtactcatatcttgcctcctatgtttcaataattaatttaattgtagtctcaattaaagaagtagtgtatatttttaaaaaatatctgtaaaaaagtattgcattttaaatttatggtgttagtataaatatgtaatcaatttacagagaaaatttaaaagtgaggtgataaagtggacgtagttagaaaagatgctggaaagatctttgaacaacttgtggcttcaaaaggaattaaaaagaccttcattgcttctaagatgggaatctctcctcagtatctaaataacattattcattttggaggatttaatgcagactttgcttttaaagctgccaaagtgctagatgttaatcctagtatttttttgaccaaaagttacagagaaaatttaaaaatcaaatagaaggtgacaagaatgaatcaattaacattattcaactttgaaaattcacaacttagagttgtgaaaattgacggtgagccatggtttgtcggtaaagatgttgctcaaattcttggatattctcaaccaagtgttgcagtttctaagaatgtgcctaccaaggataaaggtattactgaaatggaaacccctggaggaaagcaaaaagtgacaataatcagtgagccggggatgtacaagttgatctttaaatctcatgcttcaaatgctgaaagatttaatgactacgtagcaaccgaagttcttccagccattcgtaagcacggagcttatatgacggatgaaaaagcgttcgatgttgtccacaacaaagatggcttagcaagtttgttacagcaggccgcagatcagctaagagagaaggacattcaaattgaagaaatgaagcctaaagccttgtttgctgatgcggttacttcaagtaaatcaacagtgttgattggtgatctcgctaagatgattaagcaaaatggtgttcatcatcttcaaattgtcgaaaacggcacaaccaagacactaagcatggggcctaacaacttgttcaagtggatgcgtgcaaaccattacttgattgctagaaaaggttctgattacaattcaccaacacaaaggtcaatgcttctaggtctgtttgaaattaaagaaaagacgattgtccattcagacggtcatacaactatcagcaagacaccaaaagtaacaggaaaaggccaacagtactttatcaatctatttctaagtggcgaagttgcataaggtgttcgagtttatcaagcaggaaagagagcgatggacatgaagcaagacgaatggaaatcaaagccaatcatagaaataactcagaaagacgtggaaagaatgacactagatgagttaaagagaacccaagttaatttgcttattgaacggttatacgtagctagttatgatgactggtcaaaatatgcctatatgtcaggtttggttgatggtgaattaatcagacgactgggataaaaaaagagagaaaaaatgaaattcagtaaatacaaaaataagccatctcatgaagatgacttagacgaaaagatcgatagatttaataaaaaagcttactgggattatttgattccgtttttcgtaagcctaattactacactgctaacacttgcagcacttaatggaaaataagtggaagcaattttgtagtgattagagttgttgtgattgaaacaaatatcggcaaaaggatgcttttaaagagagtgttccaaaaccttgcccatctccatttgaaaaagtttaagccttcatcggtaactttaaattcggacgggtatgaatagcgagaaggcataaattcaacgagctcagcttcaactaaaagtttgaattcataactattaacttcttggtgagaagtttcatcaatactaatttgattcagcggtgctgctttttgtattttgatgtatttctttaataattttctctcggctggcaaagtctcgtatttatgcataatcattctcctaacattaaagattcgatatttatttcattgtatcaaaaggaggagtgagcaaaatgacagaagacaagatttttgatgaatttaaccaattgattaaggacttaaccgacgacttgatcagagatacagatgatccatattcggattcagttgatacagctttgacaaaagtaattagtgcaagaagaagctataaatggaaaaaagccaacgatcaaagaatcgctgacttcaaaaaacagaatcctaatgaggatcccggaaatgcaaaagtagaaatttcgtctgaatattgatgagattaaaaaatatctcgatcaactttcatgtcagtataggcatctgaattgatgcggaagttctttctcaattcacagacaaagaatgaatcattcttatctaaaactgatgaaaagcactctctaatttttgtaggactaagagtagtttttaccagccaaacagatttttgaatttcaacattgtcgttgccagaaattgtagaaattacttcctgaacattttcatacttttgcccaggtttcattagatcgtaggcaataacatatgatgccatgatatcacctccttattagaggatgacttaattttagcagaaagaaggaatagcaatgcaagaactaattaaagttacggttcaaaatgatcgacaacttgtttcagcaagagacctacatgaaggactaggacttaaaaagaagtttacagattggtggaaacaaaatagtaaagattttgaagaaaacgtggattatacgacttcacctaaaagtcacgtcgttcaaagtggcaatggaacggtaagaagatacgatgactacgccttgacaatcgacatggcaaaacagctttgcttgatgagccgcactgaaaaaggcaagcagtaccgcaagtatttgatcgaagttgaacgcaagtggaatgatccacaagagattgtcaaacgtggatatgcaattctgcaaaacgaaaacacgcaactgaaattggagaacaagaacttaactgtccaattggaggaatccaataaaaaggctagttacttagatgtgattcttggagcaccagacacactagcagttacgcaaattgcggcggattacggttataacgctaaggacttcaacgaattgcttcacaaggtaagaattcagcataaagttaacggtcaatggattttatacaaggtttacatgggtcaaggctatgtaacaactaagccgtttacctttatagatcataaaggcagaaccagatcaaagccatcaacgtattggacgcaaaaaggcagaaagctaatctatgacattttaaaagataatgacattttgcccttgattgagcgcagtgacatcgaataaggaggggctgagatgaacaaagacaagattttcactgaacaacaaattgaagtaattaaagagattgttagagatgaaatcaaaaaagctgacaagcagcgcttatcagctttgggtcaagaacttaactttaatcctgatgattattaataaactcagtgcttttatcagttagtttaagccaagtgaatccacaatcggtgcaacgaattaaatttacgtacagtgatccgccaataagattgtcttttctcattacaactaaggcaaaagttgttggacctttgccaattgcaatcggcttaacatttactgattggtattcaggacaatgcagtttattcattaaaatcacctcctttattggagatgactcaattgtaacagaaagcaggtgaggtatatggctcttctaagcattaatgaggaagaactagacagatttattgctaagcgagttcgtgaaggtgtcagagaagagctagcaaagcgcggagaaattaccgatcaaaaaatgttcagccgcaaagatgcatatcactatcttggtgtaagtggctcgtactttgataacgcggtaaagcggggatttatcaatccgagcctgccaggtgacggcagaacgagatattacttgcgcgaagacctggataggttcgcggaagacgggaaagactatttaaagaaagcaagactttaaggagaaaaagaaatgaacaaagatactgaattttcaaaagaaaagatggccaagcaagttgcaaagttgtttagcaaggttaatgaagacagcgcaattattatgtgcgtcgcaaatggatgtaatttaagtgaattagaatatggcaatccgttcgttttagtgggggtaatccagcatctaaccgacgaaatacgtgagcagattaaaaaatgcctaaggatgaagccgctccattgataagggacgctctaacgaaagaattaaaggggttacaagatgactaagaaggaatacgaaagagaatacggcaagacaaagcttgaccacgtgctaagccatatgaccattgcattcggtaaaatcctggaattcatggcaattctatttttaccatttgcgattgtagagcagctatgcatctacggcgtaacgcatcccgaccaaattatttcactgctgctggtcttgatgatcattctcacagcgctgtcggtgcgtgccgttaaaaagttaagaaagaagtgataataatgcaagctaagctttttggcatgcgactaatgcgcgctagaaaaaatcgccagctaacacaattacagctggctgaaagaattggtacaagcatgacaacgattagccggtatgaaaatgggttgtcttttccaagtaaaagacgacttagcgagatcgctcattttctgggcgtgaaagttgactggctattaacaggatttaaggaggactaatgaagctatggtacaggttcatcaattcggtgtggcgtatcaaagagcaggtaagtacagcgagagccagcttatccttgtggctaacagtaacgctattagcggcgttagcggttctgattttgcgactatgccggtagaagtaaagaagattttaggtattaaaaaagcactcattgagtagcattcaatgagcgcaaacattaaacaaagaactaaaggaagtataacacatggactcatataaattaagagacattggtgcaactgttagcacctttggtgatgaatatcaaacgtttagcgatgttttaaacgacatgattaagattgaccctagattggatattaacgacgtacaggaccttgtagacacgctaggggggtatgaagacttcgaagagagtgcaaaagaactttgcatgaagaaacttgacggagtaaatgaagacgacgatgaccccgaagccgaatggggcgatcagatgtattgccgccaggctggaaagtaagtgctgattatgcatgatgcacaacaatggctagacggaatcatcgaagatatccctaatatccgcaaagaaatgctggacgactgtcgcactatgaagacctatggcaaggcaaaacagtacgctaggcagttccaaattgactttgagggtaattataaggctacggcagaagaacaagcacagagcttatttaacagccttatcgaggacgtagtaacagaactcaatcgagaatctgacagaggagagattaaacatgactgaggcaacaaagctagcagaaatgacaaaagatcagctaattaagatagttgaccagttgcaggatgaaaagaaagaacaagccaaaaaagacaacgctagcgtttatgagcgcttgtcaaaagtagatgtttctaagtttgttgataaaaagaatggtcttaattatctaagctgggcgaaagcctggggtctggtaaagagtattttccccgatgctagttataagctgcgggaatacccatattacacacaaacagcagacggtaattatcagcagattggtacacacgattacttacgtactgagtacggcgttgaagttgaagccagcgtaactattaaaggtgagacatatagttcaaagctttatgtcatggactttcacaatagggcacttgaccctaaaaaagttacttactttgaaattaataaaacgcaaatgcgggcgttaactaaggcgttagcatttgcggggctgggtttgaacatttacgctggtgaagatttaccaagtagtgaagaaaagacgccacaacgcaaagaaagagtgaccgagcaagaactaattgaaaaagcaagaaagagcaaaactcagtacggtggtggcaatgaattagttaccgacattgtgggacttgaaatcgatggagacaagcaagcaaatgcttttttaaaccagtggtgtgaaaaagatcagaagaacaaaaatttatataaattcattattaagaatcagttagctacacacggtatgaaggtaggagcataaatatgagtgaaaaacaagtatttgaaggttcaagagctttcttgatgattccaccagctattgcaagagataaagagcttttaaaaaagccaaaaacaattattttgatgggtgaaattatctcaatgctcaatgttaccggcgaattttttatgagtaacaagaaaatagctgaaaggcttgatgtatcagcccgtaccgttaacgaatatttaggaatcttagagtcaaaaaagttaattgaaagaactaagataattagtcaagaaaacggcgcaattgtgggtagacaaatacgtgctggcgtagacctagtgaagcgggcttcactagggtggggaaatacgcttcatgggggtagtgaaacccacttcacccccctagtgaagcccacttcacataaatataacagtaataatagaacaactaatagaacagtagaagatacatatagttctgctgacgcagaaccacctatcccttacaaagaaattattgattatctcaataaaaaaactaatcagcatctacgctatcaaaccaaagcttatcagaaattaattagacaacggtttgaggaaggtgcaacgctagaagacttcaaaaaagccattgataatcaggcatatgcatggcaaggaacgaggttctggaaatatatgcgaccatctacactatttcaagcatctaagtttgattcttatgtgaatgctaatgacttaaatcaagcgaaacagccgtctaatggcggctacggtggcgagccaaatataagtgacattccagacgatgatttaccgttttaaaggtggtgataatgatgcaaggactagaaggaattgcaattaaaacagaaaaagcagaccaagtatgtccaattcataaaactcaaatggtgctagaccgcaaaggcaagtcattttgtattgaatgtatgaaagaacaaactgaaaaagaaaagaatgaccaagttaaacgctttatgcatgacaaggtcactaagattttacgtactagaagcttggtagatagaccagaggacttagaaaagtctttggaaaattacacggctaaaaaaggatcacaagaggcttcaatgggtaatgttgcttataaaattgcccatgaactaattgataaccctgataaagcgatgacaacgttgatgtatggcacgccaggcgagggaaagagccatttagcaatgtcaatccttaatatcgtaaatgctaaaagcaatccaccgcagacctgcttatttatagatgttagtaagatgtttgacatgatttatgaatctatggaagatccaacgagctggtggactaaaaagaatgttattaactttttaggtagtgtaaatgttctagttattgatgatctaggcagtgaatcgtctatgcgacagaatgaggcaacggaagcgacagaatttaagcaggacgtattaaaacagattcttgataagcaaaagagactaatcgtgacaactaatttgacactgtcacagttgcaacaagcatataaccctaaaattgttagtcgcttgttatcggattcacgtggtagacgtttagattttacaggaatttcagataaaagattggagctataacacatgattaaaattgttgaaaagtcagaaaaaaacgacttattggaattaaatgttaatgacacaatttgctgttggaatgatgatgcgtccgttgataagaactatttaatggtcacgaaattaaatgactatgaagacttagaaaagccttatacactcattgcacttaatgccactcatgagcaatgtagggcaactaatgaaaacgacgtgctagataaatatttttattcaaatcttgacgatttagcccgagatatagcgaacaactgcgatcatataaaaaaggtggatctagtggcaacagcaaaggagcataacgatgacgaagattaaggtagtacagccaccatgtgagtactgtgactttaaaaacatgaatcgagccgcatatgcatttagagaaaagaatggcaggtttggtggcttcttgtcgctaaataatgatggatcctttgacatcaatcgagggatgtataagacagaaaagaaaccgaatttttgcccgaattgcggtagagatttaaggaaagacgctacacaagataaagataagtaattgagaggatagacaaaatgagtaaatttaacgaagccagagccaaaaacattgaagatttaaaaaaggtcgttaagggagaataacgatgaatgacttactagctatgtgccgtatgctaaggttatcggcttgatgcccccgggtattaatttcacaaatcgacaagaattgtttgatttgctgacagagatgaaggtgaagatttatgaactgtaaaagattaaccggacatggacaagatgaaatgatgttccattgtgatagttgcggagtaaatatatcgatagacacttacgatgttttaacggcagaagacaacttgcattgtcctctttgtggcgcaagcgccggtcatttatccgtctatatgtttgatgaaaagaaactaaagaaaattgatggcgactttaatgtgaaaattgaaggggataggatttgcatttatctttgtgcagttcgcttatatgaattatatggcgaggataacatggctatttatagcgtttatttaaaagtggagaaaatggctaagactgtggaggcaattttggacttttcacggaaattggatcatttaaaggagctatacaaaaatgaaactatttaatgacttgaaaaagctgtattgcagtccggacgaactagaagtaggcgacttcctctattgctggataactaacacccattatcgtgttttgagtgttaacggatcaagctacgtgactattgagtgcgttgagaccggatggacaacaccagtagtgcccacaattgataacgcattagaagatattttggctcacaatgcagactttgacctaaagcatttgacaaaagttaaacctaacgaagtttacatgatttttagcagaaagtgagggattacatggcagtagtaaacgaagtaatgacaataattaatgtgattatgtcatttgcattagtgattttaatttttatctccatacgtcagaatataagattctcacgtgcaaccaatgcaagccttgacattctgtttaaaaggcaacagctcctgtcggaagacttggatcagcttcaaaaagcattaattcaagtccagaaaggtgaagtagctaacgctaaatctatcaatgccatagcaaggcaaatgactgagttgcatgaccttgttattgaagatcagacaagacaagaccaggacatcaaggcgctggcaacgcttataagcggcttgaaaacgtccagctatcgaagcagaaatgataagcattttaacaatgctttaaagaggattgcaaagctggtgaaagaatgacggttaattgcatcaagtttgtaatacctggtgagccacaaagcaaggaacgcccgcggacagttcgtagagctggcggtgttagaacttatacaccagcaaaaacgcaccgatatgaggatattgtgagatattttgcagtttacgccagaaaagaacacaagataagtgagccaatcaactcacagtgtggcgtgtccataaaagcctatttcggtatccctaagagcttttctaaaaagcgtagggaattatgcttaaaaggcaaagaacgccccacaaagaagccagatagcgacaacatcgcaaaaataatctttgatgggatgaacccaaagatgaaattaaacaaagcgctacacaaaaaaatggtgctgcaagatggattttatgaagacgataaattaattgttacgcatagcgtggagaaatggtattcaatgcatccccatgttgaggtaacagttacatgggaagattaatgacggagtgatatacgaatggcagatagagcagagcaaatgacgctagatgataatttagaggttgattcaaaggcaaccgcaaataacgtgaggaattttcttacgtttaaatttgagcattttcaaaattatgcaggtttaaatgtttctgatctgtctgttgttgatgattcacacctatctagccccaaaatggacgcgtcaggcgtttcatcgcatggtgggataaatcatactgagtcaagttttaaccgcatcatggaagcagaacaagcatgtaaagcaatttacaaaactataaaaaattgtagaaatggcggcagaactccatatcaaaaaatcttgtctgaggcttacttgcacaacatggaggactacaagattcagcaggaactaggctatgaagacagtcaatattacatcaaaaagcgtcaagctttgtgtgagtttgctgacagattcgaaaaatggaaagactggtatagcatcccctaccttaaagaccttcacatttaccgaaaaaacaaaaacggagtttaaacggacttttgtcggagtacaagcggagtgaaatggctatattatagtattgtcgaaaatttaggaagcagggttttcgactgatggagtaagaagtacgataacaacttatacgagtcttgaataaacctatatttattaaaaatctccgattaaccagtaacggcggctggcgccctagaccaggttcgattcctgatgctgttgtagcccgtttattcgggcggaatggcaattctaattccatatcccaaattttataatcactttgcctcattcgaggcattatgagctagcattcagtgtaatgccacatacgttttatataattgcctggtgtggtgaggctcaactcctcactagatcttagccggcgtggaaaaccggcactaagtataataatcatatttattaattgcataagcaataaattgaattttactcgtctagtttgggactgtgtcccagaggtcaaagcagtagtgttgaggcacgttaaatttaagtcattaacaatttcaacttggtgcttttgagtttttaacttgaaaatgttgcaagcaccaagaaccatggatatggtatatcactgaccaagttggtcacgtgcgggggttggattccctcactgcttatatgaggaagcgtgtgtataaacctatgacagggttcacgccattcaatctataaatcgacagcgacgttctgccgggataccgacggaatttcagacaagccaaagggtaatagctttggttgacctacaccgaaaaggaaataggtgtcgttggttgagtgagaaagcattaaattattgataaagtaggcaacaatgtcagcagaattacaattgccggcggagatttaggcgctccgtgtaaagcagtctcacgctaatctggcagacatgtcagggaaccacgagataaatgtaagttaaaattctggtccacgatgatccgcagaaatgcgggtataactgatacgtgccgtacgagtagcccaaaacgtggaaattacaatacaggtttttgcataaccatcaatcgcattgttgggtgaaagctggaggataaatcctcaccaagatttaaattaagcaagagatataaggtcgctccttatattgcgacttgcttaaacttgtgactgaataatcaacgatttaacaagttcaagtggttaatagccacccgcataactaggaatatagccaaaacggtaaggcaacgggctttggtcccgtaatttgttggttcgagtccagctattcctatcgtcggttcgaagctagcgacgtataaaataaagcaattatgtgaggcaataaccggtcttacataaatggttaagttagtcacgcacaggcgtgcaaatggtttgttagtccagaggtctagggcaccgcactgtctatgcggaaacgtcggttcgattccggcacagaccgttgaggttagttctgtgaacaaagtcggtggaggacgtctgcattccgacataaagcagagaagactaagagtcacggaatcgtaaaagaggaaaagcttaatgcaagcatcttgcctcatttgatcaggtagggagttagctcagatggtagagcgttgcaaggatcgtgggttcgagccccacactccctattgggctgcaaaagctcaaatatatgctctttttgaagttcaaaatttattcatttctaacccttctaactgttatccatatagttagaaaaccacagtcgtactgtggcttttagactcattgctaagcggcaagcggctagtctccaaaaccagtaatctaggttcgaatcctggtgagtctgtcatcatggtggtttatgcaaatggctaacgcaagcagtctgtaaaactgtcgccgaaaggctttgtaagttcaaatctttcaaccaccataaaattaaataaacattgaagacattctacgctatgtgtgatgtcttttttgtttccagggagtaaaaatgtatcacaagaaaccagacaagccagataaatcgccagccaagtgggttgaagaaaagaacagcaaggctacaccaaaaagaagcggtttttggcacgaatcgaaatatcgcccaccagaggacgacatcaaagaagctgaaatcaagcaagatgaaccagaattaatcattcctataccgaaatcagtagtgccaagcattgaggactacgagagcacgtttttgcataaggaggatcaagaaagtatgcaaaataagacattagtcagcaagttaaccgatgaaagacaacatttacaagacaatttattaaagattgatagcaagattatcaatccgctaggcgtgtcagactatcaggttaaattgttgaagatccagcgtactgcgatgatgaccgtggtcaacgtcttagacatgcgtatcagcgatttaagcgcggaaggcgattaaatgaccccagaaaagtattacgagcttagaaagcattataagctggtcaaagaagctgaacatttagttaagtacaataccagcaacaaggcagtagacatgattaaatttgtggcgtttaaacaaaaagcgggcatgatgccacaagagtacatagaaaagtatggagattcatggaaggactaagacatccgctgacacaagaaaataagaccataggtgaggccgtggcacataaacatagaagataccgcggcgttaaaaatccgcttagagggtcattattagagcgcagaatacaacgcgccatttattgtgttgaaaatgacgtagataaagaatttattgattggtttgtcgctgatacagggatgcaaccacaagaattcttagacaaatggagtaaaaaattaggcatatgaaaaatatgacaaaagacaatatggagacaaatcctcgctttaaaaaggctgtttttgtaaatcattacatgagtgaagaggatattaattacttgcttcccaagtaagttaaaaataagttaggagatcaattaatggtggaagaaacgactcgtttagcagaaaaacaggtgcatccctgaattaaagctttttggctctggcgaaactacgatcatataacaaataaaggctattcacctcccgtaattaagtgaggaggtgaatagccttgtcagaaattattcttactttgatcattatacttctgataattgttgcgatcaagtcgtaacgccagagccaagggcgctcgcccttgtgcggtcgagcgccgctaataatataaaagtattgaattgaatataaatatgcgttgctgagagatgacgcttattttttatgcaaaaaatcttttcaattataaaaagttagatggaaacattactcaattcctaatttagctttaataccatctgctaggatggctgaaaaattaagacctgcctctttaccttcttcatttaaatagttagggatggttaaggtctttttgactacacggttatcattttttcgcttatattccgaaatattaacagtaaccaaagtagcaatttcattgtttttggttttaggaattttagcatttgattcaggtaaatcttctaccagtgacatggttccgattaaatctttccccatatcaattgcttctgcaatagttcttccttgggtatcacggtcaaggtctggaacattgaccgtatatttgattttagggtcatcagttggagttataacgattggaaatacaacaattttatcttttttcataattaacaatttaagatggtacacgaataagggggtattgccccttattttaccctttaagattatttcgcttcataatcttttcccaagtgactttgttaagatcaccgtggcgaggaattgattctgaatgatgaccgttggtataaatatcatgattatgaccatgacggtcgaaccaccagccattttcctttaaaactttaagggcatctcttctttttaccatcttacttctcctttcacatattataatacacgtgtttaatacgtatgtcaatataaaatgcagattagtttattttttttaggaggtgaagctagttttggcagagcagaagttaacaattaaacaaaagaagttcgccgatgaatatgtcaagactggcaacgccacagctgccgctattaaggcaggatacagcgaaaaatatgctcacaccaatgctaataaattactacaaaatactacaatcaaagcccgtattgacgctcaaatgcaaaagctcgaagacgacaagattatgaaggctgatgaagctttgaaactgattaccgcaattgcacgtggtgaagagactacgacggttgagacaaaagacggtttttggttgaccgtacacccaactatcacagagaagcaacgtgctagtgaagccatcttgaagcgctatccattatctgatatggataaagcccagattaagaaggcacaggcagaagccattaaggcgcaggctgaggcacaggtagcaaaggcacaagccgaacaactccatacggttgctgacaagacccgtgaaaagatggacaagctaagcactgaggaattacgcaatttagcgaagttagcaggtgaagacgatgattaagctgacagccgccgaaaagaacggaattgcattagctgcaaaggaatcacttgcgcgtagaagttacagtgattactttctgttggctaatccaagtatgcggatgtatccacataccaaactgatcaccgagaaactgcaaaagatagcggacggtgagcagcatttctatataatttctatgcctcccacagcacgggaagagtcttacaattactaagacttttccctcatattacctaatgaaacacccagataagcacgctatgattgttgcttactcgcaagacttatacagccaatttgcagcaagtaaccggcgtacttttaatttgtggtcaaaccgcttattcaacttaaagacaggcaaaaacacagcccagacatttactgtacaagaccacagaggtggtttctatgctacttctgtgcttggtggtgctactggtatgagtgccgatttgctggttattgacgaccccgtaaaaaacgcagaagaagcgcattccatgaccgtcaaggacaagatatgggacgaatggaatttgacgttttacccacgtctgcaaaaaggtggctcggttatcgtgatcatgaccaggtggcaaacagacgatctagccgggcgcttattgtctgaatcatccctaccgtgggaagaaatcaaactgccggctatcgcagaagacattccagccggaacaactgatgcaattggacgcaagaacggtgaagccctgtgtccgcagctgcacacgctcgatgaattgcttacccacaagcatgatatggggacggtcaagtttaccgcactgtatcagcagagcccaattattgagggcggtaacatcttcaaagatgagtgggtcaagtactacgtggacagcagagaaacgcaggcaaggctaggattaaccgataaagatgcggtgattctaccacgtcacttagaccaaaccgtacaagcatgggatgcaacttttaagagtaaggctaatgacgactttgtagccggtcaagtttggtcacgccgtggtgccaattgctacctgcgccctaactggtgccacaagcgtttaagctttactgagacgctagacgctattagagccatgtcccgcatgtatcctgacgctactgtaaagctagtggaggacaatgcaaacggtccggcaatcattgacacgcttagacgtgagattccaggaattatgccggtgtcaccaggcgcagacagcaaggaagcacgtgcggcgtcagtgtctccaatgtgggaagctggacaggtttatataccgcatcctgcatggcacccagaagttaaagactggattgctgaaattttaggattcccaaacatggcgcacgatgacaatgtggactcgatggtgtacgcactaagacggcttaacacgaagtttagtggtccaattgttagatactaggaaaggaggatgtcaatggccaaaaagaaaacaagacactttaaaacgccagttgtgcggtctgattcgcttgacctaagtcctacggttgactatgaatcaattgcatggaagacagctgctcactcacaggactatgaagccttagatgaccgatacaagtatgatgctatcgctcataagatggtctcaaaggccgcaaaagacgccacaagaaacggattccgtttagttattccaggcaagccagatttacaagagatgtatcaaaaccgcttaaatgacttaaaaacgcaacaggttttatctcagcaaatcatctatcaacgcaaacacggagatggctatataacttacctagttaaagagacaaatccaacgagtacatttgaccctcttgaccctgaaaacatcgagaatgtggtagcattgcacgcattcggtcaaaagaatgtacaaagctatctaaccgacgatgatccaacgagtgacgactacggcaaagagtcaaaattgaagattcaaccaaaacaagccgccaccacattagacaggtacggtaatccaacacaagaaaccaaggacgaaaatgcgattgttcttgatgctaccaggtatagtcacatcagcttagacaagtttgacgatgaccaaacagggacatcaattatcaagcgctgtgaaaagcaactcaataatatggcgattgctaccgaatcagtgggtaaaatgctactagaatttacgtttaaggtcttccaatctgataggctgatgaatgaaccattagaccagttcagacgcgacagagacgaattagcacgcgtagcaaacaccgaagctatgatgtttactggtaacgatgacaccgtgaccaagctagcaacgccaactggtggcatgaatgtcttacttgattacttgtggcaagacctttcaacagcgtcaaacatccctaaatcggttttgacgggtgaacagtctggcacgctggcaggcgcaaggcaagacgtgcaaaactattatgacagtgtgaaagccttacaagagcagattttgaagcccgaaatcatgaatattgtccgcttgttgatgtattcgaaagaatttggcggttacttagacccagacagcttagaatggcacattgagtttaatccgctatggacaccggacgacaagacgcaaagcgagacactggtcaaccatgcaaatgcggccggaacactggtcacaaacggtatttttgcccctgatgaagtccgcaacatgttcaacgggcaaggcaacaacgcaattcaagggatgcagaacaacgcaaacgtgactgacagcgccgacaatatcgaagctcgatatacgcaagagcaaattgaccagtactacaaagacttagaaaaggcgcatcccgatggctaggcgacgaaatgggtatccattaaaaattgaacggtcgtactatcgggatatgtctaaactcattcgagagtggcaaaaaatcgccctcagagcggttgacgtgcatttacggcattatcttattaacggcactaaaatgctcacagatgcggataattcacgtcaaccagattggacaaattacgtacagcaaaccttaaatttgatgtcggtcaatatggaaaatcccgtcactgaccagattctgcatgatatgacaatgcgttttgtctatgcagtaagccagtttagcgctaataagacgcgtacacatcaagtagcaattcaggctaagatgggaccatatgcactaaatccgctaagagataacgcaaaattgcgtgagtatacgtggggcaagatcttagaaaatacccaactgatcaaaaccatgcaagggcgctatatcgatcagttgaaaggtgacatttatcgcaatatcaatgctggcggcggtcttactgatatcacacatgctatcagcaaccgtacagggatgactttgcgacatgctgacttgatagcaaccgaccaaacaggtaagatactagcccagattgacgcttaccggaacaaacaggcaggctcaacgcgctatatttggcgttcaatggaggacaaacgggtaagactaaaacacagagagttagacggcaaggaatttaagtatgatgaccccaacggcggggataatgggcagctacctggcgagccgataaggtgcaggtgttacgctgacccgattgactaaaaattaaatgaaacacaaacgcttcctcaatgcgagggagcgctttttttatgcccaaaattagcaaactttgtgaatttttttggtattccgcccgtgggtgaatctcatttaagcccgttaaatcaacattcttactttgtgaaattttaggaggattttatggcagattcaaacgaaattaaaccagtttcaaccaatttaaccaatgaagaaactaagcaagcaattaatgctttgaagcctaaaagcgtggaggtagctccaaaggtagaaaagccaattgaagttgtcaaaccaacaccagtagcaaaggaggtgaagccaatggcagaagtaaaagaccctagagggatgttcgattatacaggctgcgaacagtacaccgtgcaagatggagaaacattgtttgatgttgctcaaaagtacaaggtcgctttgcaacagttgcgttatttcaaccatgtaccaaaggacaccatgcgagttaagcctaggcaaacactgtacatccccaaagaaccggtattagtgccagtaggcgaatagcatgaacctgacacggtacgatacagcgacgattaacaagttttctgttgattcacaaacaggattcttgcatgtaagcaatgtgccaatcgcacgtgtgggcgtttttccttatatcggtaaaagtgggcagatcaccatggaagccaaacttcctgatgatttattgactgattcggctgttgagagtgcaaattcaaagccagttacagacgatcacccacaagaatcggtgaacgtgaccaatacgaaccgatatatgaagggattaaccgccaataatgcccatgttgatggtgacaagctgaaagttgacatgactatcaccgattcggcattaatcaaagaaattcagggcggcaagcaagagctttcaattggatttcaaactgatgtggtacccgttaaaggtactttcaagggtatggcgtacgattcggcacaaaagaacattcaaattaatcacgtcgcagtagttaaacgtggtcgtgctggtcattcggtgagattaaccggtgacagtgcagaaatggttatagatgattcacaagagaaaggaacatcaatggaaactacaaaaattcgtttagatggtgcagatgtcacagtcgcaaccacagacgcagaaagaattttaaagcttgatgctgacaacaaggctaataactcaaaaattgccaaacttgacgctcaaattaaggctttgacagccgaacgcgacaagttaaagggtggtgctgatgctaacaagaaatcacttgatgaagcacaagccaaggctgattctcttgaaaaggaattagccgcagaaaagaaaaagtttgaaggggatgcactagatcaagcaatcgctgaccgtatggcacttatcgatgaagtaaagccatatgttggcgattcttttgattttaaaggcaaatctccgaaagaaatgaagctagaagctatcagcaagactgattcagtcgatttaagcgctaagtcagatgactatattgacgcttattttgactcaatcaagaaccgcaataactctggcgtagttggttacacgggtattgaaaccaatgtcaagacagacagcgtagacaataaacccgcaaaagaccgctaccacttagcctaaggaggtaattaaatggcaattccagatggagaactttacaacaccggtgaacttgcaccaggtcaattagcaaccattgaacgcgcaacaatcaacaccgaacaagcaggagcaccaatcggcttcggtcaaggtgtcgcaattaaagatggtttggtagttccagcaaccggcggaaatattttcggcgtggctttacgcagaacttacttaaacgctgactacttaacacaagaaaacattgatgctgacaagtggcaaaccggtgaattatttggcgtagttcgtgagggaactattcaagtaccaatcaatgaagatgtaaatgaaaacgagaatgcagccgttgataaggacggcaatttcaaaccagcaggcgctaacgatacagtcgttggcgtctttttaggttccggcaataagggcggtaccgcacgcatgcaaacccgtatccagctttctaatacggctgttacaggttcaggtttgcaaaatgctaacgcgccacaagttgaccaacctagcacaccagcagttaacccaacgccagcaacaaagccagcatccccatcaacgggttcaacaactggcacagataacaagaacggaggtaaataatggcgaataaggactatttaacgcgtgaacagcttacctatgttgacaacgttattaagactccaaaggaacgagaattaacagctatgtcactgttccatactttcagcgttccagcatggactaagcaaaccacatacaaggtaatgactaccgctggtcaagccgctcattatgttgacggtgccgacgatatcccagtagttgacatgaatgtaaccgaatcagcatccaacttgactgatattgcgattgcggttagatactcacgtcaacaacttggtgaagctcaacaagtaggcatggacatcttaacgccaatggcaacaagagcccgtagagcactagcagaagccgaaaacaagcttatttttaatgggcttcacaattccaatccagcacttaacattaacggtttgactgatccagtttctaagttaggtgtgcaagaatcaaccgcaccggttacatttgatgcacttgctgacgacccagacaacaatttaaagattagaaactggctcaaagacgcaaaaagcaagattacacacttggctggctattcaaatgctcaaccaattttagccttgccacaaagcgcaattgatcagcttgacatgccttataaccaatacaacccacaaatgactgtattgcaaatgattggaccgtggtttaaggacattaaggcagttcctgaacttgaacaccaaaactttggctctaatggcaataaacaagatatgggttatatcttcttgaatgacgcggacattgtacaaattccagtggctcaacaagtacaacaattgcaacaagaataccactcaggacgtaccacaattccttacactgaacgtcttggtggtcttgtaatgtactacccacacgcatttgtacaattgcacggtatcaacgatccaaagaaagcctagttcggaggtagcctatggacgatttacaagacatgcttaatgctgtgaagcaattaagcccagatttaacttctaaactgtccgatgatgcactaaatgggctattgactaatgcttatcaaatagcaatggctgatggttttccaaagcttgccaagaacaacgatggtgagactatcaaagctcgtgacatggctacgcaatacttagccttgcatttaatcacgattaacaaggctatgggcgatggtggcgccaacgttaccagcgaacaagtttcagtattgaagcgaacttatgctgacgttagcaaattaaatctgttccaacgttcgccgtgggggcagctatatttatggctgtataacctttatggcaacggaagcattacaagatatggattggtgcaacactaatggctgacagcttttaagaaatcgaaaataggctagatcatatcacgaaagaaatggactatttaaaccatcatcaggtagtaattggctttttcagtgatgaaaatagcttgcttttgacgatcgtaagagccaacgagtatggggcacacattcgccctaaaaacgccagcggcttcttatggattccgtcaaggcaggctattaaagagttcggaaagaacgttactgcaaaagacgttagaaataagtatcaattgttcatccctaagggcaagcacattgcggctgtcaatcaagacggcaaattggttacatatttctatctgatgcaaaaagtagacattccagctcgtgcttttatcagaaaaaccggcatagattaccgtcaaaaataccgccgatacatcaaggcaggtattgaagagattatgtatgatggcaaaactggtaaagacttgcttgaaaagctgggacgcatgggcgtaagtgatatgagagaagtaatgagacgttggacaaagccaggtaacgcaccgctgaccatcgataacaagcgtggggctaataaccccttggttgacactggacagcttcaaaaacgcattacttggaaaatactgccaatgacagggggcacgctatgagtttctacattccgtttgcggatatgctggacagttttggagtagatttaacggtttacccatatgacagcccagcaaaaaaagctcactttcactacgtgggcggtgtaagagttgaagacgatgacgcgccaaaggtgcagccggaacagcgatatgaaccggttgtaccgaataacgcacaaaattctttcatggctcaattttatacgggtggtgagatggcgcaggcagatctcttatggatcagctctaagctttatcccacgaactcggtcgtagaagtgccgtctcagccaggtcaaaaatatcgaattactggcaattccaactttcaaggctattctgacgttgtcatttacgcattaaagggagatgataagcaccctaatggctagcaatttaccggtattgagtgatcattttttagtgcagtacatacttggcaagctggtcaatcaggtcacgggatgcgaattggttgaagatgcaaacattgacgaaatggaggattatccgtttttcactttcaaatggattgactttgaccaagagccaaacgccgactggctaggcaagcatagacagtatatctgcactatgcagattgattgtcactcaaattcgagcgtacaagctatgagccttgctagaaagctgtttgaagcactccacgaagtgccgtatcgcaggttttttaagcaagcgtacatagtacctcaaagcattggtaacacgggcgatagaaccactttacagggcattaattatgatcacgattttggttttgattgctctttcaccgttactggtggctttgagtttttagaaaaagacctcaactttaatgtcgaggattacacaattgaatcaattaaaggcacatcaagcgttgtcggcagtgataccgacggcgcttttaatgtgtccaaaaataaggaggaaatttaatggcagatgctaagacaaccactgtcgttgcaccttatgaccgtgtcagcgacgtaaacgtggttatttcagttttacacccacgtccagtagttgggctaggtaatcttttaatcctaaatgctgtcactgcaaaggctccaacgccagcgcaatcagatggcaaagacggtaagagcaccgatgctaacgcacaaactacgccagcaactaccttgccagatcaattaagcgtacaagaccgcatgaacggaatcctattacgcaagactgacaaggcaactggcgcaatttaccgcgaatacaagaacattgacgcggttgcggttgattacggtgaagacaccgcagtttataagaaggcacaaacctactttgcacaatctaaccactccgaccgtgtggcagttttggactatgacccatcaaaggcatacgacgctttgaaggctttctggtactttaactggacctttgcagttcgcacatctaatgacgttgacgacaacttagttgctctgtcaaacattttcgaagccaacaagaaccacattttagtagttcaaagcaacgatgtgactcaatttgacaagatttacggtcaaaattacaccgttggcttgaagcatgacaccgctgaaaacatggacagtgctctcgttggggcagttgctaccttgaccgttggttctgtgacctggaagttcaagcaattaaagggtgtaaccccagaagtcttgacctcaaatgaattgtccgcaatccatagagcacatgcattcgcatatgtggaagttagtggtgttggtgaaacatcagaaggctggactatgtccggtgaatacattgacgtcattcacggcattatctgtgtcaacaccaacatggaaaacaagttagagcaattcttgcaagaaaatggcaaggtctcatacgaccaagttggaattactcgaatcaatggtgttgctacgcaagttatggaacaagcctctgcgcaaggaatcatcttaaccgatgaaaccactggtaagggtgattacaccgtaactacttcacaacgtagtgaacaatcacaacaagacttgtatgaccggcattacggtggtttgagtttcacttaccacgtttctggcgcaattcacaccattaccgtacacggtgaagttcaatcagacacgattttaaactagaaaggatttattagatggcagctcataacaacgcacaaacggggttgatgggcacctacgacgccaataatgtttacttcactattgacggtaagactgcttatggctatggtgcaacaacccttttcactttttcatacgataacaatttgttatcagttcaacaagaccctcaaggaacaggtaccgcaagtattaacaacaaaactggcggtacctttactttaaccatcaatcaaatgtcaccatttaacaagatcattgatgatttagccgatgaacgtcgtgtcggtggttatgcggttgatgcttgtgatggttcacgtcactatgtgggggcacacgcatatatccaaaagaagcctgacggtggtgccgcaaacgaagccggtgaaagaaccatcactgttaaggtcttaaacgttgtagaaaattcagttctttaattaaagcgaggtaaaaatttatggacaacactactaacactgaaaaccaaaacttagaaactactgtaaatgttgacgcacaagcaacagaagcaccaaaggcagaagataagccaattagcatggctgatgtcttagctgctagaaacaagcaacttcaaaccggtgcagttcctaaccaacgtggtatcactaaggacatcactcttaacgctggaactccacaagaatacactttgacgcttcaatacccaggttttgccattgcttcaatgattgaagacgattcaacccgtgacggtgacgttaagctatcactcgtattaagcaatgctgttgataatgacgtatttgttcaaccacgtattaagagccttgatttctgggacactcacaagggtggggtagatgttgcccgtgaagtgctttcctttcttaacgacggaatcgacggcaacttggaataaggaacatctaaaagaagcggctgaccgttgggaagacccaattaggttggctatgcacggtattccgcttgatttaaccatgaaagcaaacaggaaccagttaaacatgtactgggaaatcgtgcggagagaagaaaaacaacgttttaacatgcaagcaagcgccaccggattaggtgtctggggtgatggaaagaaatagtgaggtgaagtcaatcagaaaataaactgatggcttttttattttgccaaaaagaaagggcgttaatacatgactgatgcacatgaaggcatgtcgctgtccttaaaagctaattttacgcaagtgaatgaggctaaaaaggctacacaggctttaaactcagcgttcggggaattgcagagacgtgcaaatagcttgcacatgtccgctaattttccaagagaaataaaccatattgacacggtaaccgcgtcatatgttagacgtctggaatctgagggtaaaacatacgaggctaatcaacaaaaggtcaaggcatatcagggcgcgatcggcaaattaagcgccgagcagagccgtttgcaaagtgccttgaaccgcaccactagttctactgacaaggctagtgatgcttatagaagtcagcaaataaaacttaaccaaacagttgctgaaatcaacaagtttaaagctggaattaagtccgctcaatctgagatggaacgaatccatccaaccgggtttaaccgctgggtaaagggtgctaatgaggtcaccaaagccaccagtacgatgaagagtaagctccacagcgcgtgggacagcatccgaggtggtgcaacagttgcggcggctggaattggtgccgttggtgcggctgccttttctggcgctaagcaatcagcggcaattcagcaaaggtaccgcgaaattaacaaccttgctgttcttggcggtgaaaagcaaaaagaagtaactaagtcggttactgaaatgcaacgtcaagggcgtgacatgtccattaaatacggcaagtcacagcaagaaatcgcggcagggtatgaagaccttgttaagcgtggttataccaccaaacaagcagtcggagccctccaaaccgaattgcaagccagtgtggcatctggtgacaaattcagcgatgttactacggtatcttcacaggttcttgacgcattcggtatgcgtgcagactcaaccagcaagatgctgaaaaacaccaaaaacgttgttaacgagttggcttactcagcggacgcaacttctacgggatttagcgatttaggtgttgctatgtcgtacgttggtacggcggcacactctaataacattagcctagcagaaaccgcgtcggcgttgggtgtcttatcaaacaacggtttggagtctgacaaggctggtactgccttacgtgcaacaattaacggattaacaaaccaagttaacaagattggttctaagaactctatctttactaagcttggtattaaaaaatctgaaatggtggacgcccacggcaacctgaaaggactgtcgcaagacatggccgtgctttacaagcacattgaagagcatagtaaaggtggctccgaccaaaacggcttctttaagtcgatattcggaactactggcatgaacggtgccatgattttagctaaatcttcgaaagaagtagaaggcttaactaagcggacagaaaaagccggtaagactggtacgtatgtagctgaattagccaaaaagaacatgggtaccgcacaaggtagcgccgccagcgctcaacaggctatgaatgcctttaagatgacgctgggtaacgctgttttgccggcaattaacgaagcaagtaactcgcttgctaagttcttactatcaaaagatggtgaaaaattccagaagggcgttggtaaagtcgtaggtgactttgcaaacggtcttgtaagcctgattcgttttgctacacggcatgaaacgatgatgaagtttgtcggtggtggattcttagcaggatacgcaaccgtccaagttgcaaaagctgtctcatttgtgggtggattgtacgaacagtacaagaagcttgctgatataagtcctaaggttgcatatattggtaaaaccacggggcagttaactggaacaaataccagctttaaaaacatgaccaagggcgcaaaattagctgttggcgtatctgctgtatttaatgcggctcaaatcggtaacgacttttatcaagctgcaactgctaaaaccgcaacgcaaagaattcaaagtgctggtgctggtatcggtggacttgtcggtgctggaattggtggagttctcggtggcacggtaggtgctacgattggtgcacaacttggtcaagctatgggacctgatgccgctaaaagttttgtaaaagcctttaatggacatgctgcgaagtatttggtttacggcaaaaaaggcagcaaatcaaacggcaagtatgatagtcaagccgaaaaatataatgaatccggttattacaccctgtccgaccataagctgaaaggtaaaaagcctctgtatgcttatgatgacaatggatactatgatttaaagaccaataagtaccatgatcaacgctcccttgctgaacgctcatggggaatgaatcatagattaaatttaaagaccttagcgcattcaaataatgcctgggatcttttgagtggttctgcttctacgatttggaacgctgctggacatattgctgatagagacttttggcgtagaagcggtccagaagtcaaaaaagaaaccaagggaacttggctggattggagtggcttttataagtggattggaaacaatccgcatcttaatccacacggtaagccaagtgatggaatggatagaactagaagtttattccgcgatattggtaaatgggctggaaaacaaaattgggactggggaggctttgatcctcagaaaaatggattcaataaatggctagctggatttaaaccacaagttcatggtaaaaagccccaaaatagtcaattgcagcttaaagcatctggaattcttccaaaagttaatgctaaaaaatgggctgatggagttgttaaagatgctcaaaaaggcatgaaagacttcccatcttggactaaacagcttagtgcaaagtctaataagtggtttaagtccaagtggaacggcatggagcgctggggtggtaaaactaacaaagacgttcaaaaaggctggaaaggctttacttcatggtcaggaaatttaagtcataaatcaagcaaatggttcaagtctaaatggaatggcatgaagtcatgggctggcggagtcaataagaacgtacaaagcggttggcatggtttcacctcatggtcaggaaatctaagtcacagatcaagtaagttcttcaagtctaaatggtctggcatgcaaagctgggctggtggaattaacaaggacgttcaatctggttggaaaggcattaaaacttggtttggcaatcttggtaaaaatgccgttgacctatttaaaaagccttttgaaggtctaagtaaatgggtcagtgatcacacaccaaagcctgtcaaggcggcacttggtgcagttggcaagggagtcaactgggttaaaggtaaactaacaggcaaggcacacgccaacggtgggcttatgcacgcctcacacggtgcccttgtcggtgaagctggtcccgaattagcatacaaaccttatgctaacaacgttcgcttgcttggtgctaatggtccgcaatttacaaaggtttatgctggcgagcatatcctgaatgcacgcgataccgcaaaggtattaaacggcggtttaggtaatgggctaaccctcaaaggctacgcaagcggaactgataagcttggtaaaacctcaaagaaggtaactaacgactacaaacaaattgcggacaagtcatccaagtcacttaatagcctttctaagaagagctcaagcacttggaataagattacacgtcaaacgggtaaagacagctctaagacccgaaaacgggctatctctgactactcagacatgcacaaaggcattgtcaagcagatggacaagacccatgacggtgttatcagtcttagtgaatccactgcaaaaggctttggtaaagcattaggcaaaactaaaggctttgccagggatgcaatgagcgactcaattggtgagattaacaagggtattactggaattgacaaggtccttggacagttcggcggtaatacctcagttatcaagccagttaagtttgctactggtactgacgcaaacgggcgtctaaccgaaaatacccttgctatggtcaacgatgcacaaacaggaccaagacaagaagccttagttagtgacaagaatgaattgttcttaccacgtggcaacaatgtcaccatgatgctaccaaagggctggggtgtcctcaacggggcgcagacccaacaggtggctaaatcagccggtgtaaagcattttgccaagggatcagggctaagccatagcgcattgagaaagcttgttgagaaggcgggagccaacccagcacaaagcttcaaagaaatgttcttagacaagctcaaaccaagcggatcgaatttaaagcgtggttctatcggattagcgcaaaattcatctcagcacttcggtaattcttggtctaacgcgatgtggacggtcatcaacaacgcaatcggcggtggtgatggtaaaggtggcactcgtgaagcattcctgagatttgctgagtctacattctctggcgtcccatatgtcatgggtgctatgagtaaggcggctagtgactgttctggtatggtcgcacaagctttaaagcatttcggaattaatgctgggcgttcaactgttgatatgcaacatagttccgccctccaatatcttggtaaaagcattaatcgaactattccgggtgacttggttattttcggtcatgggacaggcgcagccggtcacgtgggtatcgtcaagaatccaagaaccgggacaatgttcaatgaaacaccgccaaaagcgcgtgtcacacgaattgctgatgacatgggtatgggctatggtttctaccgtgtcaaagggttacacaatgcatcaactgctaagaagactgcaaagccagctactaacttaactgcactagcaaaacgcgaacttggtccagccgctttaaagtggattaaggacaagttaggcgatgaaggttcactcggtggcaacatcggtggtgaaggcgtcaagcgttgggctggtacagttaaacgagttcttggtatgttgcacttgtctacttctgattcaatggtcgcaagagtattgcgtcagatccaaactgagtcaggtggtaatcctaacgcaagacaaccagggagtgacccagacggtaacggttctggtccagcattaggacttatgcaaactaagcgagcaacattcgaagcctttaagcgtaaaggctctggcggtatctttaacggacctgccaacatttacgctggcttgaattatgctaagcaccgctatggttctagcttgtcagcattaggcaatggtcgcggttacgcaaagggtggacgtccaaaagcacacactccatttattgcaggtgaacgtggtccagagctaatcactgctgacggtcctgttaaagttgatagtcacgaacaaacaaagcgtaaagtttctgacttagcgcaaatgtttaagtttccaaagattaacagacctacacggtcacacagctcagcgccggtcattaacatcaacctcaacggtcctatctacgggacaagggaggatgctaagcggattgcggaactggtacgccgtgaaattaataaggttctagtaaacataagcgatgaattaggtacggatccatcgctttattagtaaggagttgtttttatttggctaaaaaagaaaagccaaaaaacaagtctaagccccgtaaggggcgcaaaaagactaaggcgcaaattaaagcagaaagaaaaataaaagaaatcaaagataaggctgataaagctcaccgtgcggcaatgaaagccaatgcgacggcaatgaacttttcagcaaaagtctttaacacgaaagatccaaagctgaaagctaaatatactaagaagtttgaagaatacatgaaaaaatatcatgcagacatgaaccgatacaaaaagtatagaaatcagcttaaaccagctaagaccagcaaaaagcgtgttaataaaagcaagaccacggatcaagccgcgatggtcagcaaaattgaacaacataaaaaagaatttacgaatgaaggcaatatggctattttcccaacattaaacgggacggaaagcgatattgtcttttttagtcccacgaatacggaatcggaaagcaattcatcaaacattacttcttatgccgttgatcagggagcacctcgtaaagactatgcgagattcaattctaagacggtcactattgacggtcttatttctgacgatattgacggtggacgcacagcccatgacaagtgggtgcaattaagaacgtggcacagtcaccatgaagaattaacgttccgtggcgacatttactataagcacttgctgatatcacaacttggccggcaatttaccggtttcaaaaacacgatgcaggtttcaattaccttaacgtttgttcgggctgctgagatcacgacaagcggtaaaaagaagaatgctaaacggtcgaagtcttctaagacgttggcaggcaacagaaacaagaactacaccgcaataaccatcaagccgggcgataccctatggggattgtcccaacgctatggtaagtcggtttcttggcttcaaaaggtcaacaagatcaagaatcctaaccggatttatgccggcaacttgatctatgtcaacgataagaagcataaggctaaaagcaagatgcgagttaagtaaggaggggtgaaatgcgtcaatatattccagtaaacattgatgatctgccggacattttcgatattgaactggctggcgaggtttacacgttaagaattgactataaccccgttgccgattggtacacaatcacaatttatcaaaacggcgaaaccttgctagaacaggaaccactcatacttaatcagttagtcgctattgatattcctgatactcgtttacctcgaattgatatgagagtgatggatgaaactggcaacgcaaaagatgccggcaaggctgagtttggctatgatgttcaaatttacatcgatgtgattgaccctcttggctcggaagatgaagacccaaccatcaagccactagggtacgaccctgacgaagatagcgacgatttaacggatcaggaggtctcatattgatagttactagcaacccacacatgtggtttgtctgcactaacgataaaggcaaaacccaaaccgtttacaacaacgagcattataagcataattatccgtttacgtttgaagttaactttgctgattcgtctacgccacagcaaaatacggtcactttgtacaacatgaccaaggagcatgcaaatttttatcataagaaattctattgctatgttgcgtttaactggggaccagataagaagattcttgctgagggatttatcgaaaaaatcggcattcctaaccacgatggtacaactgatacctttacgattactttcactgagggcacgaattacagcaatgtagccgctcgcaaattgaaagtaacaaaagaaaagaaggtcaacaaatatgtaacgaagtgggtcaagcaacctgataagacggttactagataccaccattacacagagaccaaagagtacaaacgaggtcctaaaaaaggacagaagtacacggttcgccatcgaacgccatataaagaaaccattaaaggtaagtggcgtaagaaacggattaaaacccgtgctacaaaagtagtcaaagttaataagacgtttcgcaaaggcacggactataagactttgatcaaaggaattgcaagtcaatcaggaatcgtaatttctaagattgacttagcaaagaatccaactttgaaaaagtcatttaccgcaaagggcaaaccattaacactgcttaaacaggtggtcaaaaaaacaggttcaatcatgacctacattcaaggaaagcttgaaatcattaatccaaaaagcacaaagagaacgtggtatgggattgatgaccaagacctgttacagccaccaagttacaacgaaagtagcgatgacagctccggtaaaggaacgtgggaaatcatggttccattggttccagacataaccaccaacgtggggattcacatggaaagtaagtatttgaaaggctatttttatgtgaaagccggtcaacatacatttgacatggataaagcacaaacgcaatgttcacttggaaagatttaagtcatgtggtaataagtcaaatgaaaggcgatgatatttgttctttttgatcataaatttgagtatatgaaactaagccttggtaaaggttgatttttttaatgttaaacttttgtttacttttaaatttagaccaatttttgaaattaagacctcggtgtcctgtacagtttgtcatctttgagcaatttaaagataactcgtactaattttcttgcagttaatgtgcaagcacgtttatgcggcgagtagacagcttcatcatacttcttttggtaatattttttgaaaacaggatcatgtaatcttgctagattggcagcttcaatcaagtaatatcttagatatctgtttccagtcctggccattggagtatgttcgttgctgtgatctcccgattgatattgattccaggttaggccggcatacttagccagctgttcttctttatcaaagcgatcgatacttccgatctcagcgataataccagctgtataggttttgccaataccgggaattgattccagaattttgctttctggtaatgcatcaacgatacgatcaattgctttttctagatctttaatagattcattaaagctttgaatcatgttgtaatgaacagaaagcactgcatcaattgaatcagtcattactttgcctaagcgatatgaacctctaacagctttcttaattgctttagccaaggtatctggatcggaaaagcgtcctctgcctttaacctgtaagtaagaaattaagtcttcggtaggcatatccgcgatctcatccagagttttactatcggttacaatagacatcattgtagcaccgaaaagaggagtattaatcttatctttatcgacagtgattagtttattaacccgataatataaagcttcaatgaagtgctgtttggtacgagtcagttcttgaactaattcatatctggtacgcgttaaacgctctaaagcaagatagttgtcttgtctggcaatgcttactcgataatgtccaaagcttagatacaaagcaatgtaataagcatcgagaggatcagttttactttcttcaaagactttatgaaacctgctggtttctttggggttaattacatcagtctctacattgagcttttgtaaatcttcgtcattttggaaaaagtaagcaggatgaaaactgtaaatagatgtagcttccatgccaataatgatttgatcatagtgtttattttgagctagatctaaaatttgttttttcagttcactagcaccataaagatcattgacaaagctatcgttaattaagcgtttgttttgatcttctgaatcaagtgcaacgacctgtaaatctttagaactaacatcaataccgacaaataatttcattggaaatggcctcctttctttcaaatttctgatcatagattttgatcttcacatgttaacccctaattacagttcttaagttcaatctcgccagtataagtattcactggttgcttctttgaaagctgcacctaatcccaattgctcaaggactagcaaaaagaagcaatcaatacagcatgtgagttagagcataaaggaactgtctgggtggcagacttataaagcagacaaaactgcaggaggtgataacctagaccagttgaccaaagccaatgacaattagaggctaacatgtgaagatcaaaaagcaaatactaatttgattaattatcacaatatgactaattacaatttatataatacgaggaggtgaatgtatggcacaatcacaaaacgaagagcggaaagcggctatgaacgctatgcgcaaatttcaatggggcattatttctggaatggaaaatgcattaattgcaaaagttattgactataacaagaaagatcatacggcggatattttaccgcttgctaattcaagcgacggcgaaacatcagcacaatatctggatattccggttactgaaaattgttacatgttggatgaaatgattgagcgacttaaaccagaatttaaaagaattgattctgaaacgggttcgcatttggttgataagctgcctaaaaagaagcttatgagaaagggcgtcccagtagttgcggtggtattagaccgtgataatgacaactgggaaggtggtagagctgtcaacacttacactccgaatagttcaagggttcatgatgctaatgatgcgattattgttggagttctcggaggtgatgcgaaaaatggctaaggatttattagttaatgagtacggtgatttagttattgaccctactactcacgacttagcaatcgttgaaggaattgacgaaatagcccaaagaataagggctacactgttaattcgctacggtgaaatgcctaatcttgacccagatcaaggcacagattacagcaatttcattggtaagaattttaacgctcagcttgcatccgctgacatgtctacgaccatcacagaaaaggttccagaggtcaaaacggttaatagtatcacttttaagaaaatgcctagaagaggcttatatgtggcttttagcgcaactgttcaagttggcgatggtcaaccgaaaaacgtagagggaggttttgaacttggcgatagctagtttcggactacacaagcgggggttcttagctcccacatatgaagaaatactggacagtgtagaagatgacttgatgcaacgttttggcaccgatatcgtcctgacaagtaattccaattttggaattattgcccgactgatagcgtggcgcgaaaccttgctaattcaagaactgcaaaaaaattactattctgcttatatcagcacggctactgaaagctcacttgatcgaatcggtgctaatttagatcttccgaggaaagttgctacaccaagcttcgcaaatattcagatcgtaactgatgacgaatatttgatacaggcaggtgaacagtttgagactgatgacggtgttgtgtttgaccttatcaaggacgtaaccaccgcaaaagattcaagcggtcaatacattggtgttggcgttgtccaatccgttgaaacgggcgattttaacaacgttttacctaacacaatcactattgtttctaatccggacgaagacattattagcgtgacgaatccacaaaaggcagctggcggacaagatgatgaagacgactccacatatagagcgcggctaatcatggaaaacgtggcaaagcctgaaccgtcaacagctggtatcaaatcagcattaatgaatttaccaggagtaagacaagtaaacattattgaaaatccgttcgcagacgcggaccaatacggaaatccaccgtattcggttcacgttttttgtttgggcggaaaagaagacgatatagcgagttgcttagcagataaagtagcggctggtatcactctcgctggtagcaaagaagttcaagccaaagatgcaacaggtgaagttaaaaagatcaattttgattacgcaaccgacaaaccaatttatgcaagggtcaaaattcggacaactgacgagtggaacgtcgacgacggtgccgactatgtaaagcacgaaatagctgattacatcaacagtttgcttatggacggcaccgtttacctaaccaaaatttatccgactatctattcaattgagggcgttggtgaggcactcgttgagatcggaactgaccccgaacatttagcagataaagatatacatacacagccgtttgaagccgtctcttgtgacactagaaatattgaggtggtcgtaaatggcatatgagacttctgaacagcttttagctgagatttcagactactggtataagcgacctggtggcaatctttataagctaattgatgcctttaacgagccactagaagggattagtacaaatgcaaataaggtcgagcgctggcgtgctttaaaagacgccaaaggaacagcgctcgacctttttggtgccgacatccagacatatagaccaagtcaagacgacgacaattatcgcttcattattcacgttatggagcttctttcacgggcacagggtactgtaccctcaatcgtgaaaatagcgtctagtgcgcttaaatatgaccacggtttcaaaatctggaagacaggtattcgtcacgtaggtatgcagataccgtttgatgcggttcaaaacccgcaaatggaaaagtttatgcttaacaacttgcaaaaaatgctggcgatgggttactggcttgacttgataatctttaaagctactatacacgttcacggctatctaggtgccaccacgcaagatagggaccatgaaattaataatcttgtttctagttggtggaaaggtgaaaaggtagaaagctacaatcactggtactttggtaccgatttgcagacaaccgatagatgtaccgtcaatctgcctctagctggtggagcggtgaaaaagagaacacttcaaccggcatttatatagctactaaaatgctgattcatgaaaatttagaactaaattcgatttagtagaaaggaaggaaaaatggacaacaatgcaaaggacaatacccaacctaaggatgataagtccgataagttcaaagatacgattgtcaccactgctggacgacagcttttacttactgttggcgcgggttttggcgaaattctatataccagagttgccctattcggtcaaagtgttacaagcatggacgatgaaaccattagaggtttaacaacactagatgaccaaaaaatggaggttgtgccaaccgttacgccacctatgaataactcggttactgttagcgtatctttcagcaacaaagatttaactagtgatctcacttataactcgattggctggtttgcacagaataacgatgataagaaagaggttcttttaggaattacgccggcgttaggtgaacgaactattccggctggctcaccagatcatcgatcaacagcttcactcgatatctcgctagcctttgctgtttcaaacgccgcaaaggttgacttgacggttaacgagattggcgtggctcacatgagcgatgtcaacgcggctattttgaagctcaaagcggagtatgatccgaaaatcgcagaagcgggcaaggtcaagggtgcaaagatcaacgacggagcggttgttgagcccgatgatgacggtattcttgacttgatcgttgacagtgacaggattaaggacttgccggcaggactaaccgacttgaacaatttgactgagtcagggatgtaccgtctagataccttgcaaaatagcgtagcaaataggccaccgatttcaccgctatttttacagaaaggctttttaaaagtaatttctgatgctaagacaaaaaatgtggtgcaattctttgtaacgccgatggggtctaactttgtttggctacgtggaagacgtggagatggttccgcctggtctaactggaacagagcttcatcaacttcatatagcaatgacgatattaaaaacctgatcaattcaaaggttgatggcttgaatgttgggcaattcatcaaaaaggttaacggcataacccctgacggaagcggcaacgtaaacgttacctcaactgttgcccgtggttttgatgctaatgctaatgtcgcaaccaaggaaactgttgaaaacctgcatgatcgcaatcagatcttgctggaccaaaatgcaggacaagacatcgttaactgggcaaaaggtcaatttaacacactgaacgggaatatcaataagctcaacgctaaaactgaaattcccggtgttgccaatgcaaatgatttagttggtgacgcttcttcaatcagtacttacaaattaagtaactctggcaatcttaatgtgccggatttctacccagataagcgtggcacgctaatcaacattaattatgatggaaacgctaaaactcaaatttggattccagtaggtaattcaggtggcgactcaattgctttgaggtactgggaaggcaataactatcctaaatggaaaaaacttgcaaccgttcaggatacaaccaacttgcaaaaccagatcaacgacttgaaaaagtcaaatgctgatttgatcggcactgttaactggttgaaggataatgccgcaattgctagaagattcccagctagtcaagaagcgcaagctcaacaatgggaaaatgatcatccaaactactttgcattgatcgaaaaaatagatagaaagaaggtgaaagcatgctagaccacatgatctttgacagactgaaatggttcaacatcagtgacaatactgatagcgtgaccgcaaacggcaagaattgggaagctattcctaaacaagtagtcttaccacaaggggcaaaaattgcgactttttctggtgatggttctgcttctgcacccgatgccataattatgctaaattctgacactactgcgaatgtcattggtaaaattacggactgttacgcagttactggtgtttttaatggaacgggtcaaagcacagaaaataacgctacattaaacttgagctttgatgaagaatacatttttgacgatcatagatatgaagttaattttgtgtcattcggtcttattcgtgaatcagatgttaaaagtacaaaatgggggggtaaaaaccttctacatactgttgcatcaatggttgaacgtgctttctcttcaattaggaaaggagcgaaaacatgctagatcatatgctgtttaataggttgaagtggttcaacattaaagacgatgctgaaagcatagagatagatggtaaaacttggcaagcatttccaaaaaacgttaaaattaatgacactgctactgccttgccaattggaaatataggtcacggcacctacggcgtcataggagtttcaatttcaaattatggaaaaatttatatcatccgaactgatgcaggtcccattgcaattaaatctgatgccgtaatatctgaaaactggggggggaatacctcacttatacgcttgtatcaacggcttaggtcacttttctacccacgtagggaggtggcttaaatgctagatcacatgatttttaacaaattaaaatggtgggactccacgaaccgcccactgatcggtaaaagaatcactgcgtcgcttgatacttaccacacggttaaagcgggatttaactttactgctgcggattatagcaatgtgccggctaaaaccaaggtagaaaatgccttaattgtagcagcttataaatttaatgggtcagctggtaatgcgccaagcggcacatatattttgactgatcaagataattctaaatggttaaaacttgatggctcggaaaaattagggggggtaattagccctctaaccaacttgcgtcaagcgtttagggctactgctagaaaggtggtggctctatgattgaaaagatgatcttcaataaaaatgattatcttatgttccctaaaaaggtcaaaattccccaaggagctcaaataagtaccatttttacggattttccaaatactacttactgttcaatgaacgcagatctggaactggacgtatgcgcttcttcgaaaaacggctatctagttggcagaaatagggatttgccaattatcagtgagagagatagtagcaccgtctatggtcctgtatgggttcgaaaatcggactgtacggaaatcttagggggggtaattagcccgttaatccacctataccaagtacttagagccgccaccagaaaggcggtggctgtatgctagatcacatgaagtttaaccaagaaaattattatccaattagtagcagtgatgtaacagtcaatgctaatggcaagacttatcgtgaatacaaatatcagacaattactaaaactttatcaggtaatgctttacaagttatatctaaccacactaatgatttctatgtagctgatatttctgccttagatatgaatcgaaaaactagatttacttttagtaacggtgatagctttattatgactaattatttgatttataccaacgctggaaataatgattgtggggataatgtgactaaaaataattatcaaatccgattctctccatggaaaaatgcaattgaagcatattactataatggcactgacgatgtaagtcaactggactgggtaaaaatagaaataaacgtagattagcactcaaacgagtgctttttttatgcaaaaaataaccttgctcacggggcgttcccgtgggctttttatatagaaaggagccaataaaatggctgacgaaaatacacaagttgcaccagtagcgggcgccgaaacaaacgctacacaagatcaaaacagtgttgctgaacaagaacaggctttaaaggcaaagttcccaactcttacaggcttcgtctacttgtcagatcctgacaatgcggatcctgtttggcatcacaaagtaatcccagtttttggcgatgaagcaagtgtggcgctcccatggcaagtccacgctgaaagaccatctgacagctttaaagacccagtttggacagtgggcgccactgattggagcgagaacgacaagaacaatcaagccgttatcttgcaagaaactacacaaaagctggctgaattggacaagaagagtgctgaactcgacaaagccaacgataaggtagaccaagcattaagagatatgcaagaagttcaagctcaatcatctaagcaaaacttagctttgatgaagagctttactgaacaaactcaaaacactaatcaaattcttggtgctatgcaaaagaccttagcaatggtaaccaaggcagttggcgcaaatgctaataacgctacaccggcaactgacaccaagccagcagaccaagcaaccgataagcaatagttaaggaggacataaatcatgactttaatggaacaaattcaagcaaactttttagaaatgtatcgtatggactgggaattcggcatctatgataagaacggcatgaaggacctagtagtgcaaggtttcttatcagctgaaaattaccaaaagattgtaggcgaagcttatgcgccaactactgcaacgcctcaacaataattcactttatgtgatcattagtctgctgattttcggtaaaggtttgggcttttaccttaaccgcagatttttcttttatccaccacaactagcgtggatgatgaacaacgtttacttagattgttcaatgatgattgtaggcattgcgttgctggtttacacctgttcacggtacaacaacaataagcttctaggggtgttgttggcacttgtcgtggtgctgctagcaataatttcatcaatcgaaattgaacacgtgatttttgcccatgaaatggagtttgtccagaacgctttgtcaaatacggcggttatagcctttattatctggacagcaaggcattattcaaagcgttaggggtgatatagtgcatgtcgacctaaacagcattatatcggctttgtccgctttgcttttaggctactttacctttaagcaaaacggtaaaaaaagtgatatggatagcgtggagaataaccgagattacattgttgaacagaataagcgcttaaacgcggaaaacaaaaaactactcaatgaaaatgaaaaactcagaaaggagttaagtgaaaatgaagccaaacactagaattttagattacgttaccttggtgcaagacggtgttttaaccgttgacgatgcaccacaagacatcaaggcagaggttaccaagtgggttcgctactttgcaggaatcaaagacgattcaatggtcaaggatcctgaaagcactacaccagcaccacaagtagaaaataagccagatactacttcttttttaactaagaaggtgactgactaatgaatttaagccaacttaatgaatatctttttgtgggatttcttgcctttgtcgctgtatgtcaaggtgtttctactggtattgatttctttgcgtctaagtcaaagaagcctttaccaaaggaagttatgaccattgaccagattgccaagttcgtagtaagtgaagccgctacgctcgacatttcaggtgctgaaaagaaagctaaggcggttgaagctttactgaaccaagcacaaaaggaaaacaagccccttaccgaatccgtagcaaagggagctgtccaacacgcctatgaccaaatgcaggctgattccgaaaaggctacacaagacaaggatgacaacgcccagccaattggctttgtaagtggtgatgattctgatgcaaaagattagatataagacttacaacgaatttgtttttgaatcttttggaaaatcgtttgaaaaccaaaagattgccaaaagaaaccaaatgaaaggcggtgaaaaagatgtcaaacttaaccgtatcaaaaagaagtttgggtgttgatgtcgccagctaccaatcagaaaatgtaagctacacaggtgctaagttcgcactggtcaagcttacgcagggtacaggttacctcaacccaaaggcaaaaggacagatcaagagctcacttgctcacgggcttttaactggcggctacttttatgctacacactctggctctgtattaaaagcacgggcagaagctaagtacgctgttgaaaaggcgaaggcctacggcatccctcttggttcgtatcttgcggacgactgggagcagggcagtggcaacgacgtcaacggcgctgttggttcaaacactgatgctgtcatagcagctatgcaagtgatcaaagaagcaggatataagccgctagtatatgctggtgcttatgtattgcgtaaccgtctcaacacagctcgaattgtaaagtcattcggaacttgtttatgggtagcttcatataaagtcatgggtcgtcaagattccgctgactttaattacttcccatcaatggacggcgtagcaatctggcaatttaccgataactataaggggtataacgttgacggcaatatctgcttgatcgatttaaaggcaaattcaggtagttctaagcctaaatcaacaaacaagaccggagaatcgctgtctctgcatcccgttgtaaagtggaatatcggtgctgtcgcagtagtatccaattcaaagggagcatacgtttacacaagctccaaactggacaagcgggaaagcgacaagctaaaaccgtgtggttccatgtggcaggtgttcggattggaaaacggtgccgtaaaagttggcaaaaatcagtttttcgatggtcgtgccgtttatgtgaaggctaaccctatcgcatataacgacagcaaacatgcagtagctaaggttgttttacctcatactcatgcgctagacgctccaaaggctgacgcaggcaaggtttacggcttggagcttaactcaaaagtcgagatccagggaagagtcggacgctttttaaagattaaagagctacacaaaggcaagcaggtatatgtgacgggcaaccgtgcgtatatcgtgctgtaaactttacaaagatagccataatgagctataatttatccataataaaaaagaaaaggagttgtaaaagctccaaatgtcgtgcataaagccacctcggaggattgttcctctggggtggcttttttgcgttatattttaatttttattgcaaatgtagatacaaaagtttatactaaataaaaaggtttaattaagacttgtaaggagatttataacaatgtgcaatgtggaattgaaacaatggggcaattcactagccgtacgactgcctaaaactattttaagcaaagccggcatcaatgaattaccgaccaaatttgatgtaacagttaacaaaaataatgaaatcgttttgaaaaaacaaaaagagcctgaaagcttaaaagagcttttcaaaggctttgactataaaaaatattggagcgactgggaaaaagaaaatcctggcaagtccaaagaagaggactggggcggaccagttgggcgcgaagtcttttaatttagaagtccttattagaagggaggtgataatttgaacagcagaaaagacttccatcaaggtgatgttatcatgatgaactttgacccaaccaagggacatgaacaagcgggctatcgtccagcgcttgtcgtgtcaaacgatgatttcaatatgatgtgtggaggagtgatcaaagtggttgctattactactaacgaaaaagaatttccactacacgttgaaattccagaaggtttgccagttcacggcagggtagagctggatcatgaacgttcaattgattctcggtcgaaagccagagaatgtaagtatgtatgcagtgtaccgtctgaatttttagatgaaattctccgaaaacttgcattaacttataaaaaaagccactagggagtaacactagtggcaaattaaagcttatatactgtctatatggttagattcagtatataagcttttttggtgcttgtaaagtcgcctgattttatagatagctttaaggcggtccaaatcaaacgctaaaaaattggcgtgcagatcctgaaaagttaaaaaatagcatgggagagggtacacctactagctaagttgcatgatcttagaaaactgccaaaatgagaataaataatgtgctataataaatttgggttgcaatgcaggattttcaagtcgatcggcctagcaaaaaccgctcacagcttggctgtgggcggtttggtagttatcaaaaatctactgaaaatctactgaatacccagcagatttaatgtgatctgttgggacaaatcaaaacgaaaaggactataagttaacgtatgagacgtgatagtacaagaatttatattgacatcaacggtaaataaaaatggctaaaaataaaaaaaatagtgtaagtacaattttacttagagttgctgctatcatattattgcttgttggtattgctttgatatttaacaaacagatcagtgatcaattaattcatcataatcaacaatctactttaagtggaataaatagaaagacaattgaagaaaacaaaaagaaaaaaggaatgtatgattttagtaaagttaagtctttaggcattgcacaagcagcaagatcacaagtgaaaaagacttctggtgcgattggtgcgttagctattcccgatgttaatatgtatttaccgattatgttggggatgagtgatgatgcaatgtcgactggtggcggcacgatgcgagccgaccaagtaatgggtaagggaaattatcctcttgcaggtcactacatgacagcaaaaggtattcttttctcaccacttgaagatgttaaaaaaggtgagttagtttatttaactaatcttaacaaagtatatgtctatcgaatttatatgaaaaagattgttgatccaactgcggtttggctagtcgataatactaagaagaatattgtaactttgattacttgtgctgatggcggtaagaatcgttgggcaattcggggtaatctgattaaaactgaaaaggctaacaacaataatcttaaggtttttaaattaaaataaaaatttacaatctttaatcagatttagatttgcgataaaattataaatagattttgtaataaagacactcaacaatgagtgccttttcgttttgatgagagaacataaggtgtttgataattaatgaaatggcaagaaagaacagctgatgaattagcaccagacttgattgagaaatatcaactaggtcccattgcagccaaactttttgcattgcggggtattaatacagacgaaaaacttgatttttggtttaatgcaacagaagaaaatctggctgatccagcgttaatgcatgacatggataaggcaattaaccgaattaatcaagcaattgatagcggcgaaaagattacaatttatggcgattatgatgctgatggaattactgcaacgactattatgactgaaaccctaagcattttgggcgctgatgttcattattttattcctaatcgcttcaatgatgggtatggtcctaatatggaccgctatcaagatattgtagctgatggaaccagattgattatcactgttgataatggtgttactggggtcgaggaagtcaaatatgctcaagaacataatgttgatgtaatcattacagatcatcatacttttcaagaaaagaaaccggcagcttatgctactgttcattgtaattatcctggccaaaaatatccttttgatgattattgtggtgccggagtagcttacacgatttgtcgtggtctaatgcaggatactatgcctgagctgctagatttggctatgatcggaactattggcgatatggttaaggtgaccggagaggggcatattatcgttaagcgtggtttagaaatgcttaatcagacagatcgtcctggcttgcgcgctctaatcaaaaatgctggtttgactttaggcagtattaatgaaactgatgtcggctttaatattgctcctcgattaaatgctgtaggtcgattagataatgccaacttggcagttgagcttttgctaagtgatgatgaccttgaggcccaaaaaattgcagataagatcgaagaattaaacaataaacggaaagaattaaccaccgaagtctatgacaaatgtatgacgttaattcataaaaatagctggcaaaaacaaaatactttggttttatatgaccctgaatttcacgaaggtgtgttaggtttagtagctaataagatcgttgaaaagacacataaacccacgattgttttgactaaaaatgatgcaggtgaggttaaaggctcaggtaggtcctttgctggtttcaacttgtttgatgctttaaatccgatcaaggatcaatatttaaccaaatttggtggccatgattttgcctgtggtttatcattagaagaaaatcagattgcgccattacgggaaaaatttgaagatgactttcatgttgaaggtggtcttgagactaaaaaatatgacatggaattgcctatgcagggcttaactccgcagacactagcacaaatcaatcaagtaggtccattttggacaggtgacacgcagccaatctttagtatctctaatccaacaatcactcatttctttaaaatgggtaaagataagaatcatgtcaaatttacggttgctaaaaaaggcggtaacttatcagttattggatttaataaaggctttttgaataataatcttttgccgtttatttctcaaatttttgttcaattatcattaaatacttatcgaaatcaagtttctttacaaggaatcatgaccggactagcttttgcttcaccaaaattggcagtgccaacgccagttgttgacttacgccaagagaaatatgttatgggtttcgcggaccgctacctgttatttgatcaaaaaaatattccgattgttcgcaaccgactacagatcgatgaagacaagatctctttagttaaagattatgatcaaactggtgaaacagttgcattattagatgtgccacgcaatcagattgaattaaatgctgcattggagaaagattatcaacaaatctatttacgctttttgcttgatcaattgcctgttgaacaaattcccgctaaaaattattttggtgctgttttaaaatatatttatagtcaccctacgttaaagccagcagattaccgtacagttgcaccttatttgggactagattatgatagtgtgcttttcattttacgagttttctttgaattaggctttgtaaaattggatgaaggtaaattggtaggagagccttctcctaaaaaacagccgctgacagcttctaaatatttaatgggaacttcttctcagattaaatttgttaatcaactaagaactatgcctagtcaacgtttgattacatatgttaataatttgacaaataaatagataactattctgttttcagtgcttttatcgttaaaatttgttaaaatatactggtcaaaagcgtttgaacacaaacacagagcattttggaggttatgcttcttatggcagttgattttagtaaatatattgcaagtgttaaggattttcctaacaaaggcattgtttttcgcgatattacaccaattttgcaagatggtgaattgtatcgtgccgctactcatgaattagcggaatatgcaaagagtaaaaaagcagatgtaattgttgggcctgaagcacgtggttttattgtaggttgtccagtagctactgagttaggtttaggttttgtacctgcaagaaagccacataagttaccaagagaagttgaacgtgcttcctatgatttggaatatggttcaaacagtttggaaatgcacaaggatgcgattaaacctggacaaagagtggttgtctgtgatgacttgatggctaccgcaggtactttaagagcttctaaagagctaattgaaaaccttggtggtaagttagttggtgccgcattctacatcgaattgccagatttacacggtagagataaattacctgatgttgatatttattcacttgttcaatatcatggtgcttaaaatagaataaataaaaagagggaattaaatcaatttgaactgagacctaaaagttagacacttttaggtctttttctacgtaaagtcaagcataataagaagtttggcttcattttttgtttaaatttcaacttaaacatcttttagtgtcgatttatttttttagttagacacgacaaataagcccagatccatatctgatttttgggcttagcgttataatgtacttgatcaattaattacgactaaagtctttttgattatgtgtggctacgttgtaatcatatggttgatcattgataatcagggcataaatggttctgattagtttatgaattgaagcaatagctatctttttgaaccctttggtttgagaggatagctttttgctttcataataatctgctatatgacacggatttgtcttagctgcattatcaatttgtccaatagctcgataaagcaacttacgtgcgactgcattgccatgtttagtaatacttaaattagagtccatttctcctgactgatatctgcctggatcaattccgataaaagcattgattttattaggattactaaatctgcgtaaatctcctaactctgctaaaactctgacagcagtggtctgtgcaaagcctggaatgctttctaggttttctaaatcatgattaggcaaagacttcgctaacttaaccattcttgcgattaaattttctctttgatcacttaaattaagcaatctgtgtgcataatactgcacttgctcgacttctatgctagagcaagatacaactggataagcttgataagctaattcaattaatttatctgcagtccttagagcgtgtttaaaagcaatcccctttaagctcattaaccagttaataagctgttttttatcttctcttcttactaagtcacaatgaggatatcgcacaactatttgccagtaatttttacctttagcagaagaaaataaattttcaatttcaggaaaagtcgattgtagagcttggtgaagtcgatttttagctattaccaagtcacttgtcagctggtcatagaagcggctcaaagcattaagctgcttataagtttgggattcgctttgattaaccggatggcgataaagtctttgaattaaagctaaatgataagcatcagttttatcggtcttgttgtagcgtagccccatattcatctcttttttggctttaagcggattaataacaacatattcatagccgtagtcttcaagaaaagcctgcagtctgcgtgaataaacaccggtagcttcaaaaataatttgcggatgtttagaaaaagcggttaattcatgaagcaattgaataaaaccaggacgattattagtaatggttagttcatttttgctttcaccaattagttcacaaacagtagaagtagacttgcttacatcaattccaaaagtaacttgcataataaaaacctccaaaacttagtagtaaaacgtatttacttaagaaatcagatctaattttctaaactcgacatctagtgtccacattcttcgaagagactattgaaaacttaagtaaaactgccagtttattatgcgacatcaagtgtctaaagacctcagggcatatcgttttaccactactttaattctacaaaagaataaaaatagtgaatcaattatcccgtcggataactaattcactatttagcttagaatgtttattatttgttaccgattaatttaaattttgaccatggtttaataaagtcgagcaggaataattcgtctgatctaatagaaccgactttgttcatccttgactccttatgaggttcaaggacaatttgtagttcatttttgtaatgaccaaagttgtcgttaccaatgataatatctccgcgttggaattctacattgttgtcgtgtactggattaggaatatctgcataagttacacggggcatggttgaacgaattacatccttagtgatatcaccacgacggaaatgttgaggcgcttctacgatagttttctcaatcttattaacatcagtaacgtagtttacgtgcaacatcaattgatagcgattaactttagataaggcttttaactcggcttcactggcataagcattaccgatgattacatcatcaatcaacccagaagcccagagatgcattgcttgcacatcaattggtaaattacggtcttgctcaagcgttggtaaaccatcttccacgttccaaggtcccatttgacctacttgacttgagacaaaagcggctgaatgaatgccaaactttttgaagcgttcagaacaagcgataaagaagtcgtaaggtaagccagtaccgcgttgaggataaaaattgtgacagccataaataaacggtgtattagcttggtaagaaataatattgttaagatagtcaacattattactcatgttgagttcaatgattagaccatatgggttgtaagaaagcattgcttcaattgcaccatcaaatgttgtgtcaagacggatgcctgctgcaccaatatcagcaaaaaatttcaggtcatcatagctgacacctagttgtttgaagattgcaggattaacatctaaaaaagtttgaaatcccaatttattgccatattcaatgatttttttatacttagctttggtttcttcagggctgccttgtacttcaagcatactcatgaagatacgagaaaagccatatttgtgagctaagtccagatagtgagcgttgccttcaaatttgctgtggcctggataaattgacagacctaaagatctcattgtcataatagtacctcatttttgataattgtctataccaattatatgatattttttattgtaggtctagtccaaagtgaccgagatagtttatattttggtagggtgtctcgctacgtttttaattaaacaggtgttatatttaaagtacagggtatgtgttaagaaggagaaattaagatggataattttgatcaagaatctggtcaacagcaatatgctaatgattcaggattaaatgttttttagcaaaatatatggttatatggccttagcggttttcgtttcagcaattagtgcttatttgacaatgacggtttttgcgggacctatctctgcctttattgcacaacaccaattgtttacggcgttacctttgcttttattgcaggtgcatatagtggacaaaatattgcttcagcatttgtagcttcggcaaccgtctttgtaacaatggcgattttaggaacaattaccaaaaaagatttgagtcgaatagggtcttatgcttctgctgcgttaattgggttgattgtagccatgttagctaatttgtttttacataatccaatcattgactacgttttttcgattattgctgtgattatatttactattttaactgcgtgggatgcacaaagaatgaaagatatttatttacaatatggtgatgatctttcaactaatgggcttgcagttttaggtgctttgcaattatatcttgattttgttaacttgtttttacaatttttggatatttttggtgcaaatgaagataagtaattaaactagtgagactgtaaaatagtttgtgtaaggatgaatgattccttaaatttatttctttaaacattagaaaaaggagttcctttctcgtatgattggtttgaacaaaaaaacacatacagaaagaagaactccttcatgaatgattttaccaaagattttgctcaagctctattcaatccagacaaaataaatgatttattgcgcaaagagctacaacaggctgttaataacttgttagaagctgaattgactgcctttctgggctatgatccctatgccagaaatggctggaatactggcaactctagaaatggtgcttatttccgcaaagttgatacgcaattttgcccaattgaagtgcaagtgcctcgggatcgcaacggtcaatttcatcagcacacgctgcctggctacaagcagcactcggatatcttggaaagcatgattatcaagctttactccaagggcgtgaccaccagggaaatagccgatctaattgaaaagatgtatggcagccattacagtccagctcaggtatcaaatatttccaagcagatgattccaaaggttgaggcttaccacaaacgcaagctaagcgacaagtttttctgcgtctatttggatgcgacataccttcctttgcgccgagaaacatttgagcgtgaagcagtctatattgccattggcatcaagcctaatgggcacaaggaggtcattgactactgcattgcacctagcgagaacattgaagtctggacagatatgcttcaaaacatgaaatcccgaggcttaaagcaagttgagctttttctttctgatggtgttgttggcatgaaaacagccttggccaggacttatcctaaagctcattttcaacgctgtttggttcatgtcatgcgcaatatctgcgctaaagtacgcgtcgacgatcgtgaaaagatcatgaacgaattcaaacaggtgcatcaacagacaaacaaagaagaagccacagctgtcctgcatgacttctataccaaatggggcaaggtttacagccatgttatcagaagcttgaaagacatagaaccagatctgctggtcttttataactatcccaagcagatcagagcttcaatttattcgactaacatgattgaatcatttaacaatgtgatcaagcgcaaagctaagcctaaggcatagtttccaactgaacagtcgcttgatgcttttattggcattcaggcaatgagctacaatgaccgttatttcaatcgaattcataaaggctttggtcaggttcaggacaccttagaatcctactttgattaaataaataattaaaaaatcaatttacgagaaagaactatttacacaaaagatttgacagtttcaaactagtttctaataaacgtaggaacacttcatatataaacgtatactatataaatatagtaacatattaagggagtgtttttatgaaaagatgcaagaattgggttgtgactattgttgcatttctgatgttagtgggagaaatcagtgttctgcctgcaaatttgcaggggtcgacatcagttgttaatgcagctattcatcacagaaggagaaagcatcaatatcgtgataaaactaagatttataccagtaattacagaattgttgataataaacgatcaaaaatctttcacgtaatgcgcggtcataattatcgaatgaatcgtgaaaatgcagttttcttcaagagtaaagcagcagcacgtgcagcaggatatcgtgaatcaaaaagataaattaaaagacttctaagagttcaaagttcctagaagtcttttaatttataaaatttatggtaataatatacctgtttttcatcacaggttggtaaattaagtcgattattatggcagcaataatcgctacaattacagtaattgctaagttttgaatggaaatctggaccattgcccaaccacaaagagctaagataaaggtcaatagaacatctgcaatttgaacactaccaaccaacttggatgggtaatcttgccaaaagtacttacgagttctagtaatcaaaacaatcaacattgcgctaagaactaggtatacgtaaaccatagtagaaacagcaccgtgactccaaccgtgtgtgtttaagaaccaaacaaacccaataccaattaaagtccaaccagcagctagtgaaaaggcgatcttagcaagcttagccatattccagttttctggcttataagtaatgtgagtcctgtcagttccaatcatcatcgtaaccatattgttcataatggtatagataaccattgcattcaaggccattgggatgtagtcaaagaaaagatagccaaaagttaacagcatcgttaattcagcagttctagcaagcttggttagtgaccaagtagtcattctttggtatacgcgatgtccagcgtctaaaattttaacaattgagcctagaccatcgtctagtaataccattttacccgaacgcttagctacgtcagcagcatttgaaactgcgattcctacttcagcttgttttaatgcaggcgcgtcgttaactccgtcacctgtcatccctacgatatagcctttttcttggaaaagctttaccatcttgagtttatcttctggtaaaacatcagcaataccggccaaatcattaatatcagtattttcattgaaatcgtgaatcgaaattactttaccagttaaatcaacttgttctgccactgcagcagcggtcttttgattgtcaccagttaacataattgggcgaacgccacgtttcttgagttcagccaaagctgctttagagtctgttctaactttatcttgtaagatgaagacaccagctaacttatcgtcaatcaagactgccactgagcgtcctgccttgaaattaattccagaaatttcttcatcggcatgtttatcgatcaaagataattgcttaaatgaaccaagctttacattatgtccagcaacatcagccatagaataaccagtgtcagaagtaaatggagtaaagttttcagcattcatgactggaatgttattttctactaagtattcatcgattgctgtatcgataataccagcattacgtttatcagttgcggctccagctaaagcaagcacgtctttgtcaggcaagtcacttagatcagtccaagcggctacggcagttttgttttccgtaattgttccagtcttatcaagtaaaagcaagttcaagttagctgcgtcctgaattccagttaggtcagaagtcaggactccttctttacttaagcgggttgcttcaaatgagttggataaagcaaaagttgatggcattgctacaggaattgaagcaataaacatcattgccaggaatggcaacatattaataaaggtattgaaattaccgcctttgaagaaggaggcgataataataactaaggttaaaacaccatctagtaagcaaaggtagtagataatcttagtcaaaagttgttgtaagtgaccaggagcagcggaattgttgatcaaattaatcgtcttaccgcttctagaatctttacctgtagcagtaacaacagctaggccatcaccttcaacaactgtagtaccggcaaaggcggtgtcatcaattgctttcttaactggtttagattcacctgtaattgagctttcatcacaagctaagttaccgtcaacaattttaacatctgctgcgagtacgtccccgcgtttaagtgagattaaatcgcctttaactagttgtttagaatcaagtttgatccacttgccatcgcgttcaactgatacagtaggagtcaacttgtgtgaaatattatttaaaactcgtcttgattgctttttcttagatgcaccgttaaatgcagcaaataaaagcatcaacaacacgaataatgattggacccatttgcccaagatacattctagaattaaagcagcttctagaatccaagcggataggttccataacttagacaagaactctttaaagaaattgtattcaggctctggtacttcatttaagccatcttcttttaagcgcttgtctgcttcggcttgagttaagccgtgaaatttatcagacattattttccctccaaatctaccttaataaggtagcacagatattgctatgaataaaatactaaaatacaatataagatattaaatattttaatatcactatcaattgaaataaaaaaagggagactgtaaaatagtttgtgtaaggatgaatatttccttaattttatttccctgaatattagaaaaaggaatccttttcccgtatgattgatttgaacgaaaaacatactagaaaagagattccttcatgaatgattttaccaaaaatatgacacaagctctattcaatcaagacaaaataaacgatttattgcgtaaagaactccaacaagcagttaatgatctattagaagctgaattaaccgcatttttaggttatgatccttatgatagagctggttggaataccggtaattctcgcaatggtgcttatttccgtaaagttgatacacaatttggcgagattgaaattcaggtgcctagggaccgcaacggcatgtttcatcagcacacgctgcctgactacaagcagcactcggatatcttggaaagcatgattatcaagctttactccaagggcgtgaccaccagggaaatagccgatctaattgaaaagatgtatggcagccattacagtccagctcaggtatcaaatatttccaagcagatgattccaaaggttgaggcttaccacaaacgcaagctaagcgacaagtttttctgcgtctatttggatgcggcataccttcctttgcgccgagaaacatttgagcgtgaagcagtctatattgccattggcatcaagcctaatgggcacaaggaggtcattgactactgcattgcgcctagcgagaacattgaagtctggacagatatgcttcaaaacatgaaatcccgaggcttaaagcaagttgagctttttctttctgatggtgttgttggcatgaaaacagccttggccaggacttatcctaaagctcattttcaacgctgtttggttcatgtcatgcgcaatatctgcgctaaagtacgcgtcgacgatcgtgaaaagatcatgaacgaattcaaacaggtgcatcaacagacaaacaaagaagaagccacagctgtcctgcatgacttctataccaaatggggcaaggtttacagccatgttatcagaagcttgaaagacatagaaccagatctgctggtcttttataactatcccaagcagatcagagcttcaatttattcgactaacatgattgaatcatttaacaatgtgatcaagcgcaaagctaagcctaaagcagagtttccaaatgaacagtcgcttgatacttttattggcattcaagcaatgagctacaacgaacgctatttcaatcgaatccacaaaggctttggtcaggttcaggataccttagaatcctactttgattaaataaaagattaaaaaatcaatctacgagaaaaatctatttacacaaaagatttgacagtttcaaaaaaggataaataatatgaatctaaaacagttacgttattttctagttgtagcagaagaaaagcagattacagcagctgctaagcgcttgtatattgcacagccaccattaagctatcaattaaaacaattagagaaagagttgggcgcgcaattatttaaaagaacggcacatggtattgagctaactgatgtgggacaaatttttcaaagctatgccaatgaaattatttctctagctcaaaatgctgaaaaccaagtacataagactatttccggtgaattgggaacgattgcaattggaatggcatcttcctcaacgggcttgataccaatgaattcttttaatgaattacgaaaatattatccggaaatttcttttgatatttatgaagataatacttatggcatcctggataaattagaaaaaaagacaatcgatctaggcattgtacgaacgccttacaaccagacaggtttaaatactaagactttaacaactgaaaaaatgatggctattagtgtagacccagattttcagccaaaaaaagaattacgcattaaagatctagcagatcagccattgattatttatcgtcgctttgaggatatttttaatcaaacttttgcacatcatgggcttaaaccattttatgcggttaagtgtgatgattcacggacagcaattacttgggccaagagaaaaatgggagtagcgctagtaccagaatcaattgcgacaacttatgcccaagaaaatatgatcgcaattaaacatgctaattggataacacatttgcagctggtttggcgtaaagatcatcaagttacacctttaatgaaaaaaatcattgctgcaatatgataatactgtaacttttacctaattgatccataataaatgtaaacgggtacaataattaatagaaggtggttgaatgtcgagtccgattcatgtttattcagaaattggtaagttaaaaacggtgatgttacatcgaccgggaaaagaactagaaaatctagccccagatattttgcatcgaatgttgattgacgatattccttatctgaagattgcccaagaagaacatgatgcttttgcgcatgtattgaggcagcaggggatcaaagtattatatcttgaggatttattagcagaatctttaacagatgagaaagttcgtcgggcattcttagatcagttactggatgaatcaagtattaaaaaacaggatcctttgcatcaattattgctgaactatctccaagaattgctaactaaggaaatggtaaaaacggtgattgctggaattagaaaaagtgcgattcataattctaccccatctttagcagatttggctgaggacccagattaccctttttatcttgatccaatgccaaatgtatattttactcgagatcaacaggctgcaattggttcagggatgaccattaaccggatgactttcagagctagacgacgtgaatcattatttatggaaacaattttgaaaaatcatcctgatttcaagaacgcaactattccagtttggcgtgaccgttatcatcatggtcgccttgagggcggggatgaactagttctaaataaccatgtgttagctgtaggtatttcacaacgcacttctgcaactgcaattactgacttagctcataatttatttgatcattcaagttatgatacgattttagcgattaagattccgcacaatcatgctatgatgcaccttgatacagtttttacaatgattaattataatcaatttacggttcatccctttattttagataaagccggcaaaattgatatttatgttctacagcccgatgatcacaacggtgtaaaaatcacagaaaagaatgatttggtgcaggttttgaaagaaaacttacatttaagcgaattggatttaattccaactggtggtggtgatccaattgccgcaccacgtgaacaatggaatgacggctcaaataccttggcaattgcaccaggtgaagtcgttacttatgatcgtaattatgtatccaatgatttgctaagaaaacatggcatcatcgttcatgagattcggtctagtgaactctcacgtggtcgtggcggtcctagatgtatgtcgtgtccgttgattcgtgaagatttataagaggcaaaaaatgaaatatttacaaaatgtttttcaaggtagaagttttctcgattgtaaagactatactccagctgaaatttcatatttaattgattttgcattacatttaaaagaacttaaaaaagagcatatcccacatgaatatctgaaaggtaaaaatattgcactactttttgaaaaagcctcaactaggacgcgatctgcttttgtagtagcttgtaatgatttaggtgctcatccagaatatctaggcgcaagcgagatccacttaggtaaaaaagaaagcgtcaaggatacggctaaagtcctaggctcaatgtatgatggaattgaatatcgcggttttgctcaagaagatgtagaagagctggctaaatattctggcgttcctgtttggaagtgggtgatggccgcgataatgttgccgacagtcttttagtttgtggctcaatgttaggtgttaatgtacatattgttacacccaagcctttgtttacacatcctgatgtacaaaaaattgctcaaaattttgcccaagattcaggttcaaaaaatttgatcacagatgatattgctcaaggcgttaaaggagccaatgttgtttataccgatgtttgggtttcgatgggtgaaaatgattggtctgaacgaattaaattattaaagccatatacggtcacaatgaaaatgatgcaaatgactggtacaccagatgaccaattgatctttatgcattgtttgacagcttttcatgatcgaacaactcaggtgggagaagaaatctatgaaaaatatggcttaaatgagatggaagtaactgatgaggtctttaattcaaagtatgcttggcaatttacagaagctgaaaatcgattgcattcaattaaagcagtgatggcggctactttaggaaatttatttattccgattgcctgtggcggtggtggcatccttgttattgtgaaagatgggcatctcagaggtgttgccggcgtaattcataaagatttttccgctgctaaaatggcagaagatatcaacgctgatgaattagtaattctaacaacggtggatcatgcatttttgaattatggcaaagaaaatcaacaagcaattggtaaaataaaagttgaacagctcaaacaatatctagcagcaggttatttcgcagctgggagtatgaagcctaagatagaagctgcaattgaatttgtagaaaaaacaggtaatttagcaattatcacctctttgagcaatgccaacaaactagcagacggagtcggcacaatcatttataattaactgggtgataaaaatgaatatttttaatgaaggaaaaaagcaggatattgcccaagttttagcagctaaagataggcgagtagctgtacaacataagatttttaataagtatcctaatcaaactctagtcgacattaatatgaatatcccaggaccaatcaagaataatcgctatttaactaaaatgtttatgttgggtatcaatgagctggaaaatgcttggactaacctaggttatcattttaaattggtgacacagcttaatgatgatagtggctgtgaaaacttttatgtattatctttgtcaattgaaaaagtaaagcgctcaacaattgattttgagaatcagatatcattgggacgtctctttgatgcagacgtgttggtaaaaaataaacaagctgcaatttcacgcagagatttgggcaggcagccacgtaagtgctttttatgtgatcgccctgctaaagaatgtgctcgcagccggagacattcagtggaacagatgcaggcatttatctctcagctttatcaagaatacgttgcgtaaaataaaccgggattttatgattccggtttatttttatgaaaaatctagttaaaaatttaaaaaatgaactaaaatagtaatgaataaatttatagatgtacgtataggaataagcatggaattaaagaaaaataagaataatttaaagcaaattacggcattaattcaatatgcatttttgaaaaataatgatttgactaaagacgaaaattttatgagtcgttatgatcatagtacaggttatggctattttgataaggaaaaattagctagctatattatggttaatcgatttaaaagtgatgtttttgggcatcatttaccgatggctggaataggttatgtagcttcatatcctgagtatcgtggccaaggtcatatttcccaattaatgaaagaaattttgcatgacttacataggcaagatattccgtttgctaacctggcaccattttcggagagcttttatcgccagtacgggtttagcaatagtatttatcaaaaagaatatcgctttgatggaagcgcattgcgtagttttaaattaccacgttctggtcatatagtgcgtggcaagtgggacaatttagctgttcaaaatggtgtgattcaactttatgaacgtcaactgcatactgatgatgaacgtaacacggttgtacgtgaggcatggtggtggaatagacttgattcttattatcatcaccgcaatgtagccgtttattttgacgcggatgagcggccaattagttacttgatttatcgcattagagacaatacttttttagctgatgaaatgtacgcaattacgccgcagggattactgagtatgtttggttttatgggttcgcacgcgggcagtgttaagcaatttaaaatgagcgtaccagagaaatcgttacgagctgaactttttcctgaacaaaacgaactccaagttgatttgcgtccttatatgatgagtcgaattattgattttgaaaaagttttggcttgtatgcggccaatgcaagaaggtgattttaatctggaagtcaatagcgatgaacagtgtccttggaatattggagtttggcaattaagtaatcatggacgtaaggtagcggtagaacgtaaggaagatgcattggttgatttttcgggatcaattaccgcgtggacccaggtgctattaggtagactaaccatgaatgctgctgttaaactaggattaattacagattaccgcatcaaaaaattagatttcgttaaaggcgatgtatcattttatgattatttttagttgtgaggttaaaaaatgagtaaagaaaagaaactcaatttaataaaattatttggcattgtagttagtggtttgaatttgatcttttttgccttgatggcacttaataagcatgaagatactaaggataaaagaagagtagcagaagaaggacacgcaccgctggatgaaaaataaaatgacggaattaaagattgcatattttgaccaattaggtcgtaaggaattagatcaggcagtgcagcattttgtgttaaaacatcctaatgtagatgtaaaactacttgcgactagtcatgatggtgcttttgcaaaactgaatgaagatgaagcagacatagcaatcaatgatttgcgtgacgagaatcttaactttgatgaaacagaattgactcaagctggtgtaatggcaattttgcccaagggaatgtatcctaatggcattcaaatgattgaaaaagacgagctcaatgatatgacttgttttattgtggctaaacctgaagaagaggttagtgagctacatttatttaaagatttgtatcaaattggcagtcaattcatcgcttctaactcggtcgaagaagcagcactgttggtcgcctctaggtctggctattttattttaaatgagaatacggctaggttaattaatactacagatttgcagccacttttcttgcttgatcatggtcagttaataaagcaaaagataatggctttttataagtcaaattcagcgttaagtagtgagtttataaagctattgcagcaagaatattaatctgtaaagttaaaaatatcttgtctaagtactataagatactgtaaaatatattatgaaagcggactcatatattttacattctggagatgatttttatgctaaaaagaactttgttacctttaacatcaatggtacttgttttaggattaactggtttggctagtcaagttgagactgttgatgcttcaacttatggtaatggtgtacaggttactattccaaaaaagatgcagggtacttggtactcttatgatcgtaatgcacataatggcacaaagatcacctttactgaacatactgttaatggcaaaccaatatttacccaggaggcttcgacaattagtgattacttcaatggtagaattgctaaccagaagaactttgataaggtaacgcaaaactggatgtctggtaaaactaccaaaatgaagaatgatacattctatgagattgatccgtggattacttttgaaaattggagtctttatcgagtggtaccacaaaccattaatggtaaaaagcataacgtgctggtttattctagtagatatgatggtggtaactacttcagaagcaagaaattagctaaaaaaatgaaggactacaagtttaagaaagttaattacacgttatagttttgtgacatcccttaactaagggatgttttttactaatagacgcgataaaatttagtataataatgacaaaattaattcttggaggagaagttatgaaattaaaacaaacaccaattttgcgtttatataaactagaaactaataaagaggatcatgcaaagttcgttaaggcagggcaacataatatgcttacttctcaagaaaacgaaccaggcacattgtttatgcagacaagtcatgacgaagaaactactaattttgtagtagaatgctatcaagacgaagcaagttatgatactcatgctaattcaaagcaatttaaggattttactgacgttgctaaagatattttaactagtcgagtaaaggtagaattgtttccggaatttatttctacaaaggcagaaaaactagcagttaccggatcaaatgattatgttatttatctgactgaaattggtgtttctttaggtaagggcgatgagtttgctcatgctgtaatgaaagaaatgaaaacggcagtcgaagaagaaaaagatattttggcaatgattgcaggaactgttgccgatcaaccaaatgaatggttagctattgaagtttatcgtaataatgaagcttacaagcagcacttggaaactaagaacttcaaagagtatttgaataatacaaaatattgtgttgaaagtaagagtttacgtaagttgcaaccagatgtaattgttgaccaaggtgcaattttctaccaaccataaagaataagacgaaaagaagaccaggctatgtggagtacataacctggtctttctagttagaggggaaaagatttattaacatatattattctggtttttagtggcgatgttttacctttgctactgctggtttattaattaatactgagctgatggccattaaaccaagcgttaaaaatgatccaccaattaagagtagtttaatcaaggttctcattcctttcatcttaattgatcttataatagcgaaataatattaagaatttatatgtaaaacctaatggattagttaagaaaataaaactagaaaaaaggctggttagcacgtaaaatagaaatagagtcaaagtctagtgcaactgcgcataaaataaagcagtatcgatgggatgctgcttgttttggttaaaaaatagagaatatgcttgtagcccttttcgtaaatagcgttaatgttgtaaaatggaaagtgcattaagtttattaatgagaaaattgatgtattattgcaaaataggccgtaatggccctttttgttgtgaaaaaattaaaagaatataggattggaaatgccaggaatagtagagcaaacattattagaacaacaaaatattgatttaaatgaaatggtaacaatgaatcaaatgattgatcaattgttgcctaatgcaagtaaagaattacaacaaaaactaaagattaaaatttataactttgtgcgtacacgtaaacaaccaagtattactgtgcgaagaagaaaatattttaagccggctgttgctaaattaattattggtaatgtacaagattacgcagatgcaattgaacgtcgtgctaaggaagccccagctaaagaggatgctactgataagaggccagcttctaaatctaagcgggttaagacaattactaagcgtaagattttagctaaagttataaagaatgataagattgataaatctattcaaaagaaattagaggataagattgcttcaattgtgaagaccaactttattaagccagttaacaagcggggaagtttttcggttgaagatggtgaaaaagttatagctgaacttagtcctttttatcaaaatatcaagattgatcaaaagtatcgcaagaatgctgaaaaagcggctgaaaataaggaaacagaaactaaagaaaagcctgagcaacattctaaggatcagaatgaaagtcgtgaaggtcaatctaaggactttgagcgtaagaataatcagaagaatagcaataatcgaaataataataatcaaacgcaaaatcaacgtaagcgacaaaataagcatccttttgagatcagaagagaaaataataaccgctcacgtaataatcagtctaaccgccgctataataatcgaaataattatgataatcggaataattatgaatttgatgaagctagcggtttgcgtgaacgctacaatacagtaatcagaaattacaatcaactggagcaaagatataatgctttgcaagataaatataatcaggctttagatgataaagctagattgatcgaagaaatgggtaagaagaacgaagacttacgtcgtgtattgatcgacgttttgcgaaaaaatgtagtttttggtaaacaaagagactagtagtcaatttgaattgattactagtcttattttatgtttatgaaatatgatttagcttaaaaattaaaaaaaatatgtgtaaaaaattatttttgtgtagtaagattaaaggatgataaatatttttattaatgattaatggaggagaagtatgagtttaaaagagctatttaaaagcaatgtgtttcgaggaaactgtcaaatcttttgtgtaaatagatttttctcgtagattgattttttaatcttttatttaatcaaagtaggattctaaggtatcctgaacctgaccgaagcctttgtggattcgattgaaatagcgttcgttgtagctcattgcttgaatgccaataaaagtatcaagcgactgttcatttggaaactctgctttaggtttagctttacgcttgataacgttgttaaaggattcgatcatattggtggagtaaattgaagccctgatctgcttaggatagctgtaaaagaccagcagatcaggctcaatctctttgagatctctgatgacatggttgtacgctctgttccacttgtcatagaaggcgtgcaagactttgatcgcagcttctttatttggctgttgatggatttgcttgaattcattcatgatcttttcacgatcgtcgacgcgtactttagcgcagatattgcgcatgacatgaaccaaacagcgttgaaaatgagctttaggataagtcctggccaaggctgttttcatgccaacaacaccatcagaaagaaaaagctcaacttgctttaagcctcgggatttcatgttttgaagcatatctgtccagacttcaatgttctcgctaggtgcaatgcagtagtcaatgacctccttgtgcccattaggcttgatgccaatggcaatatagactgcttcacgctcaaatgtttctcggcgcaaaggaaggtatgtcgcatccaaatagacgcagaaaaacttgtcgcttagcttgcgtttgtggtaagcctcaacctttggaatcatctgcttggaaatatttgatacctgagctggactgtaatggctgccatacatcttttcaattagatcggctatttccctggtggtcacgcccttggagtaaagcttgataatcatgctttccaagatatccgagtgctgcttgtagccaggcagcgtgtgctgatgaaattgaccgttgcgatcccggggcacttgcacttcaattgggccaaattgcgtatcaactttgcggaaataagcaccatttctagagttgccagtattccagccatttctggcatagggatcatagcccagaaaggcagtcaattcagcttctaacaagttattaacagcctgttgtagctctttgcgcaataaatcatttattttgtctggattgaatagagcttgagcaaaatctttggtaaaatcattcatgaaggagttcttctttctgtatgtgtttttttgttcaaaccaatcatacgagaaaggaactcctttttctaatgtttaaagaaataaatttaaggaatcattcatccttacacaaactattttacagtctcgtttcgagcctgcattattatcttattgtatgttttatacgcattatttgggagttttagtgaatatttatttaaatatgctctgaattcaattactgctggtaattttaatacatatgtttattggcaaataatgcagtttgttttagcattattcacttagttgcttttaccaattactaccgttgttttcactaggcagacgcaaaactatctgcataaaattcggcaagaaatcatgcatcattactattatgaaaaaagtgatgaaaaagtctctagtatgcagaaccgattaacagccaatttaaaaatcttatcagatgattatgctacaccttggattactatcttaagtggggttttagagattgtgattgctattgttttactagcaagcatgaactggattctaattttggttactgccattttagctgtgattacactttttgctcctaaaattatggagaagaaaacatcagctgccacagataaagtaaataaaaagaatgaaaagctgttaaatacaattgctcattggcttggtggattgcaggaactacgtcgttatagtgcatacagtcgtttggttaagcaaattcatcgatcaagtagtgattatgtggacgcaagtaagggtagtgcaaaattaagaagtgtaagttatttgattaatgcttttagcaattcaattgcacaaattggtatgagctttattgctggaatcatgtttttgcttaatatgatttcattcggtgattttgcagttgctagtggttttgcatttacgattttttcagcaatttggaatattactcagtcgttaacgcaagttaagtcaactaaggctttacgcgaacagattaccgatttaagaaagcaagttcctgatgaaaataaagataaagtatcagcctacggtcttaaagtttcaggcttgtctgtaaaatacgatcagggggaaacaattttttatcctgattttacaataaaaaaagggcagaaagttttgcttactggcgattcaggaacaggaaaatcaaccttgtttaatgttttgttaggtaagctaaaacctgaatctggtacggtgacctatctagatgaaaatgaaactatcattcctgaaggaaaagctagaattggcaatatgccgcaaaatccagtagtttttcccgcaacgatcaaagagaacattacaatgtttaacgaaaatttgcaggataagcttcaagatgttgttcaagcagttcaactccaatccgacttagccaaaatgccagatggtgttaatacaacaattgatctaaaaagtgaaaatttgtctggtggacaacggcaaaaagttgttttagcgcgaacggaaatacacgagcaatcgtttgttttaatggatgaagtaactagtgcgatcgatcaaaaagctaccgaaaaaatcattgatgaattgctcaaaacagatcaaactattttgatgattgctcacaactttacgccagaattaaaagcaaaatttgatcaagaaattaaattaaaaagtaagaaaggggataaagtaagatgaatttgaaagcttttattaaaaccaatccagttcgtttctggttaactgcaattggttggattattattcctgctttatcaattaccaatacttacgttgtacaagaagagacgaatatccttttaagtcgtaattggactaagtttattttaatcaatgttcttgcttttctgattatgttagttgactatggtgtgagtgctttagttgattatcagcagcaggctcaggtacaagacttaaatgatcaagttagagataaaattgttaagcgatattattatgacgggaaaaagcatactgttgcacagatgcatagactgtaaaatagtttgtgtaaggatgaatgattccttaaatttatttctttaaacattagaaaaaggagttcctttctcgtatgattggtttgaacaaaaaaacacatacagaaagaagaactccttcatgaatgattttaccaaagattttgctcaagctctattcaatccagacaaaataaatgatttattgcgcaaagagctacaacaggctgttaataacttgttagaagctgaattgactgcctttctgggctatgatccctatgccagaaatggctggaatactggcaactctagaaatggtgcttatttccgcaaagttgatacgcaatttggcccaattgaagtgcaagtgcctcgggatcgcaacggtcaatttcatcagcacacgctgcctgactacaagcagcactcggatatcttggaaagcatgattatcaagctttactccaagggcgtgaccaccagggaaatagccgatctaattgaaaagatgtatggcagccattacagtccagctcaggtatcaaatatttccaagcagatgattccaaaggttgaggcttaccacaaacgcaagctaagcgacaagtttttctgcgtctatttggatgcgacataccttcctttgcgccgagaaacatttgagtgtgaagcagtctatattgccattggcatcaagcctaatgggcacaaggaggtcattgactactgcattgcacctagcgagaacattgaagtctggacagatatgcttcaaaacatgaaatcccgaggcttaaagcaagttgagctttttctttctgatggtgttgttggcatgaaaacagccttggccaggacttatcctaaagctcattttcaacgctgtttggttcatgtcatgcgcaatatctgcgctaaagtacgcgtcgacgatcgtgaaaagatcatgaacgaattcaaacaggtgcatcaacagacaaacaaagaagaagccacagctgtcctgcatgacttctataccaaatggggcaaggtttacagccatgttatcagaagcttgaaagacatagaaccagatctgctggtcttttataactatccccagcagatcagagcttcaatttattcgactaacatgattgaatcatttaacaatgtgatcaagcgcaaagctaagcctaaggcagagtttccaactgaacagtcgcttgatgcttttattggcattcaggcaatgagctacaatgaccgttatttcaatcgaattcataaaggctttggtcaggttcaggacaccttagaatcctactttgattaaataaataattaaaaaatcaatttacgagaaagaactatttacacaaaagatttgacagtttcgtaatcgggactttctgtattgaaaaaatgaagagataatttgttattgatctcaatttttaaatcttttttgttaacggtaagcgtataacagtgtcgtttgcagataaaaccatttcttaataaaaaatctacgattggattttcatttgaatcaatcatgacttgcaatgcttggtgctctgcttgaactatttttgaaaatggaatatttacagagtaatcacttagattgaattttagataaatatatttgttatgaaaaagattgtgataagtagaaatagtgcctagatgcttatcgttatcagttactttgtagattttaggagatattttttcaatttttgtagtcattttttatccttttgataattgaaattaatttttgatcggttccgtttttaattatgaagttataaatcggttcataattgagcacagggaaaataagatcaggatcaattttaggtataatgtcaatcattgatttcttactaattacgttgagatttttaacttcttgagcatttcttatctttctttttgcttgtgaaggaggataaccttgtccccaaggctgttcaaaaagattttttatagtctgctcaaaattgatttcaccactccaaccccaattaagtcctagtggaaaggagacaacattgccgttattgatatgaccaaaaagaaaagcatcttgtggagtggggatataaccacattgaatattaggaaaagtatttcatgcaagcatcattccttgtccagaagtacatcctgtcacaatgaagtcagtcgccttgctattaattaataatgcgacagctagggaaacttgcacgtaagatagactagccgaactatcttgataaataccaaaattgaatacttgatcattggatcctacagattctttgatatacttctctaatatgaaatttttacttttttgcgatgtagcttgaataatacctattttcatatttttaacctctatagtttatttttttgaaagcgctttataatattatataggaagtaaagtaagaaggtgaacgtgatgaaaaaaattattgttggaactcctgttaaattgagccatgttttaatcggtatgattgtggtagttttactttcactatttttgacaggatttggttatcaagcttggtggctattccttattgtactaattttaggtgtatttgtaactttacctacttgttttaatccgtattggcagattagtagcgaaaatattacaattataaattatgatattaacgatgtgataaaattgatgcaactgctagggttacataaaaagagtaagcaagttattaatttatctgatgtaaagaaagctgccgttgtctatcgtaaaaatgtacgtcttagtcctattgactttaatcctgattatttaaatttgattttggatttaggtaagggaacaaatatgactttgacacttggaaatgtcgactatcagcaactaaattcgattatgggtttgttacaagataagaatattgtagtagatgataaacaaaatattttgcaacttttaagagaaaataaaaacttgtttaaccattttcacaagaaaggctggacatcgctataaatggataaagagcaaataattagaaattattttcgagcatggctaagtcctaatcttgaagtagtccaaaatacatttgacgaaaatgctatttatagtgaatgctatggtccagtttacagaaataaaaaggagataatatcttggtttgaaaattggaataaacaaggaaaagtaattgcttggccaatagaaagactcataattaatggtgatacgagcattgccgaatggcattttaaatgtaattatcaaggaaaaattagtgaattcgatggtgtatcaattatagaatttaatgatcaaaataagataatttctgtaaaagaatatcaatcaaagtccaaacattattatccctatagtaaataagacttttaactgttaagaggttaaaagtcttattttgaatatgaaatcttttataaactaatttctgtggaaaaaattaccaagccagcttcgtttctttttagcctcttcttttcgtcgctgttcacgatcttctaacattgccttagctagcatatcaactgtttgagtcaattgtgcttggttatctctttgttgcttatctctaaatgaactactgttttgatacttattcattaacgtatcatcatcaagccatttatcaaagttttcaacatcaataataaaaccggtgctagtttgttgcgatgcaatgtgatattttctaggcaaatatttaaagtagcgatcaagcatagtagaaccgctgtttttcgccgtttgatcggagattttattgaaaagttctttattgatttgggcttttagccggtcatcttgtttaataaataagatatcgcttccgatttttgcttgattgattaacattccccaatcatttcgaccaacaaatagggagtaatcgtaattttcttcaaaatatttgctgacttggttatacatatcaaatttatcaagtgcagtttttaaaacatgcttgattggatataagaagtctctttcaatcttctgcgcatcttcaacactaacgttagtaaagaattttgctaattcaacttgacaatatttaaaaagatcatcatttgcacgactaaataagctagttaatgcagcattacgttgatcactttcacctgaaaaagtagattcaaagcttaaataccataaacgacgcataatttcaggctttagagaaaattgtgatttaatagagctttcttgtctattcatcgtgaaaatgaatgctggtgagggatgagttaaattacgattgttagtaacttccttgatgaatctttcaaagtaagtacgggttgtaagctcgggactgacatcatcaatcattaatggacttacaggaccatttgtatatacatagtcacttagcgtgttggtaattgtcatattgatattactcttgccaagggcataattctttggatccatcattccactatctaagaaattatgagcaccaattaatttagcggctagtcttttccctagggtggacttaccagttcgaccttgtccgattagtgctgtagcaataggcacgtcttctctagatacattgcttccagataattcatataaattgcggattttccaaagccatggtgattcatatagaaacagcataaagtcacaagcttgccagccttcaccaacttctttgtaagtattatattcatgagtgatatcacagaaaagttgaagcgcattttttaattgcccttcagttaaatcagaagtaataacttcagaagggatgttatcaccaattttagaggcttggaataattgaccattattgtaaaactgaacaggaacagggaagagatcttcttctttttcaatttgtgatgtatctgcttttgcctttttgtcttgacgaataatgtgctgagtcaagctatataaatcttgcccgattgtatctagcttacgtcttttattgccaccttcaccaaataaagtaactgtttgagaagcaacgagtttttcattttcagataatttctttaattcatcatctttgctgtagtggtcgcgatacttttttatctcttcagctgggagaataattatgtctttaccagttgaattaggactgtttttgatttcaagagaagaatcttgcattacatgaatgcgaagatcgtctttatttttgtcttctaaataaccagatagttttttagcattaatataagttgtagcctgattaaggttatcttgaaacatttgttgatagcaattgaataatggatcagaagtattgccgtaatcccaaactaattgttccatatttttattaacagccgtatcggtaagattcattgaacctgaaaaggcagagtacttgctttgattttccattaaataaagcttagtgtgaatcaaattctgtttggtgaaaaaaagctgtaaactaccatctaaaatacgtttagtgaagggactatcttggtgttcgtagctatattcaatcaaatcacgacgtttatttaaaatttggtcaattcttttgccaattgaatttgatccattatcggttagtccaagaattagtgtgatctggtcaaaacgtggtataagattttgctcaataaatttaatattagaaacaaaggaaacgcctttaaactcagagaatttatttgactctctttgaaaatcaactaattgccaaaaatcggcattggaaattagtttttgatcagtatgatttagtatttctaatcccatataaaatcctttcgtgagtatacaaacatttgcttttagtgtatcgtgaaaaattggattagagcaaggaaaagttaatttattattgaatttatgaattagattaagtaaaatctgattcaaataacggaagtaaaagaaactgtcaaatcttttgtgtaaatagatctttctcgtaaattgattttttaattatttatttaatcaaagtaggattctaaggtgtcctgaacctgaccaaagcctttatgaattcgattgaaataacggtcattgtagctcattgcctgaatgccaataaaagcatcaagcgactgttcagttggaaactctgccttaggcttagctttgcgcttgatcacattgttaaatgattcaatcatgttagtcgaataaattgaagctctgatctgcttgggatagttataaaagaccagcagatctggttctatgtctttcaagcttctgataacatggctgtaaaccttgccccatttggtatagaagtcatgcaggacagctgtggcttcttctttgtttgtctgttgatgcacctgtttgaattcgttcatgatcttttcacgatcgtcgacgcgtactttagcgcagatattgcgcatgacatgaaccaaacagcgttgaaaatgagctttaggataagtcctggccaaggctgttttcatgccaacaacaccatcagaaagaaaaagctcaacttgctttaagcctcgggatttcatgttttgaagcatatctgtccagacttcaatgttctcgctaggtgcaatgcagtagtcaatgacctccttgtgcccattaggcttgatgccaatggcaatatagactgcttcacgctcaaatgtttctcggcgcaaaggaaggtatgtcgcatccaaatagacgcagaaaaacttgtcgcttagcttgcgtttgtggtaagcctcaacctttggaatcatctgcttggaaatatttgatacctgagctggactgtaatggctgccatacatcttttcaattagatcggctatttccctggtggtcacgcccttggagtaaagcttgataatcatgctttccaagatatccgagtgctgcttgtagtcaggcagcgtgtgctgatgaaattgaccgttgcgatcccggggcacttgcacttcaattgggccaaattgcgtatcaactttgcggaaataagcaccatttctagagttgccagtatcccagccatttctggcatagggatcatagcccagaaaggcagtcaattcagcttctagcaagttattaacagcctgttgtagctctttgcgcaataaatcatttattttgtctggattgaatagagcttgagcaaaatctttggtaaaatcattcatgaaggagttcttctttctgtatgtgtttttttgttcaaaccaatcatacgagaaaggaactcctttttctaatgtttaaagaaataaatttaaggaatcattcatccttacacaaactattttacagtctcaagtaaaaatataataatatgttatcgctttggagaaaattatgacaacagtatattttgtaagacatgctcaacctgatttatcagttcatgatgatttaacacgtcctttgacagaaaaggggttgcaagatagaaaaaaagtaactgattactttagagataaacacatcgaccaagctttttctagtccattcaagcgtgcaattgatacaattcaaccagttatagacgagaagaaactaacattatcatctatttctgactttagagaaagaaaaattggtgatgagtggatttctaattttcatgaatattgtgaaagacagtgggaagattttgattataagctaagaaatggcgagtctttaaaagagacgcagaagagaaatgttgctgctttgaagctagttttgtccaaatatcaagatcaaactatgattattggtggacatggtacagcaattggatcagtaattaattactatgatccaagctttaaatatgaagcctttgctatgatccagccaaagaatccatttattgtgaaaatgaactttgatggagaaaaatatttggagtataaagtagttactttttagtaaaaagataatctcataaagtaaaaatggtaaatcaaggtactaataaccagatttaccatttttttatttgttatattatagcttatgttaaattttatcctgagcaatgaaattatcataaatggttttgataactacttcttcatcttgccgtctggtaccaatcataattgagatttgggatgcaccctggttaatcatttgaatggagatgttctttttaccaagagggtaaagcaagctagcacataaagtcagcttgtccttcatcccttcacctaccaccattgtgattgcataatcatcaatccactgcatttgatcaggatttagactagtttgaatttcattacagataacatcaattaattgatcagttaagacatcttttttgaaaataatggtaatatcatcaattccagatggcatatgttcatatgaaacatgatgtttttgcaaaatttccattaacttcaaggtgaaaccagcacctttatttaacatatattttcttaaataaagggccgcgaagtttttgcctccggcaatacctgtgattgtgtgtttaggtataaagccgtcctctggtacgatcattgtcccaggtttttctggagcattagtatttttaacattgacaggaatttcgccttgaatagcaggaattaaggcttcatcgtgaaagacggaaaatcccgcataagatagttcccgcatttcttgataagtcattcttttaattggcttgggctgatcaacgatatggggattggctgaaaaaatagcatcgacatcggtgaagttttcataaagatcagcgtttaaccccctagctagaatagcaccggtaatgtcagaaccaccgcgagagaaagtagcaatatgtcctgatggtgtaatgccatagaagccaggaaaaatgatcttttcatcttttgcagccttaattctttttaagttcacataagtttcaggattgacttcagcattattagaagtgccagtgacaattaaacctacatcttttggctctaaaaatcgtgctttaattccttgatgatttaaaattttagcaatcaaaattgcattaagacgttctccgtgtgctttaaaggttgccatgcggtagtcattattagggtaacttagcttcggcaatgtaagtagaagctggttaatatcctctaattctgcttcaggcagctcaaaatattgggcaattaattcataacgcttaaaaatacgggtagcgatgtcttgataattattactcctcaagctcatatatgcgtaagtgatcattagatcggttactttaatatcatcctcagttcttttgcccggtgctgagactacaacgacttgtctttcgggatcggcattaataatacttagggccttatctacgctattacctgaggctagggaagaacctccaaatttaacaactttcatatctatttttccttaactattatttcaaatctaaaattgaactgatttctttttccatatcatttggttcaataattttttcggtcttgggttcacgatcaaaaagggcacgcacaccgattgataattgaccgcctaattcatcatgcaattctttaattgcaccgacgccagtttgcatactaggaccaccagtgatggcttcatacaccgtttctgggaacttatatggactggctgttgaaacaatgaccattggggtttgatcgccggtcttcttttgatattgatttgctacaaaagagccaacagcagtatgtggatcaattacatagcggtcataattgtagacccgtttgatttctgatttaacctcttcttctgttgcaaaaccagctgcaaaatttttttgtaatttagtgaaaacttcaccgctaacttgataatgaccgcgttgagtcaattgattcattaaactagcgacttcatagttattttcgccataaaggtcaaataaaagtcgttccaaattgctggaaactaggatatccattgctggtgcattggttaaatggaacttacgtcgcttatcgtagacaccattattaaagaaatcagtcaatacattgttttcattagatgcacaaatcaactttttaataggcaaacctaatttcttagcataatatccagctaggatgtcaccaaagttacctgttggcacagcaaagttaacttcgtctcctagtttaatttcttgtctgcgtactaattgtccataggtgtagaggtagtaagaaatttgcggaaccagacgaccaatattcatcgaattagctgaagaaaattgatagccattagcattaagtcggtttttgaaagaatcattgttgaagatttttttaacttcagtttgagcatcgtcaaagttacctttgattgcaattgcacgcaaattgttgccgcgttggctgagcatttgcttaagttgaacaggactaacgccaccttcaggataaaagactatgacatcggtacccttttgattagcaaagccacgcattgatgccgtaccagtatcgccagaagtagcggttaaaataataatatctttatcaatcttttcaatttgaacagctctggtcattaattgtggcaacatttgcaaagctatatctttgaaggcaagggtaggaccgtgaaaaagctccatgtaaaaatggttatcgtgcttttcgattggaacaatgctgcgatcatcccattgttcactataagcgctttgaactgcagtggtgatttgctccttagtaaagtcatcaaagaataagctaataaccatggcagcgatttgcttgtaggaaagtttggataaatcttctaacttaaaattagcttgaggaaaggcaacaggcacgtaaagcccaccgtcttgagccaagccttgaataattgcttgaggtgcagttaaagtgttttcttttgaacctctagtactacgatattgcataaacaatcttcctatcttatgaaatattaatattataactattgtaccttgattagcacctatgatacaatcgtaaaaataagaaaatcattaaaaagaggataagatcaaatggccatcaaaattgcattgcttggattaggaacagttggttcgggtgttttaaaaataattaaaaataataaaaagaagattagacaaacaagtggtgaagaaatcatcattgaaaaagctctagtacgtaatccagaaaaacatcgtaatttagctaacgaagtgatgctaactacagatttcgattcgattttgcaagatcccgaaattaaaattatagttgaattaataggtgggcttcatcctgctaaggaatatattactgcagcaatcaatgctggaaaaaatgtagttacggccaataaagacttaatggcaacttttggttcagaattgattaatttagctgcaagtaaaaagtgtgatttaatgtatgatgctagcgttgcaggtgggatccctattttgcggaccttggctacctcttattccagtgacattatttccgaaattcaaggaattattaatggtacgacgaattatattttgtcacaaatgggggaaaagggactaagctacgaggaagcgctgaaaaatgctcaagagctgggctttgcggaggctgatcccactaacgatgttacaggtaaggatgcagcatacaagattgtaattttaagcaagtttgcttttggtactaagattagtattgatgattttactattcaagggattaataatctaaaggattttgacattaaacaggctcagaagttaggctatgtcattaagctgattgggattgccaaaaatattaatggtaaattatttgtagaagttgctccatgtttgttgccagaaaatgcgattatggcgcatattaaaaatgaactaaatgctttacaaattaagagccaaagcctaggaacagcagtattcacaggcccaggtgcgggtagctctgcaacggctaattcagtcatgagtgatgtgattactgaaataaaaaacgtagtgaaaaagaccaccggtcagccatttagtaatttctcccatgttatgcaattaacaagttcggaggatgtgaagtattcctattatttatctttcgaagcagaagagaccttgtttgatttgagtaaattactctctgatttggaaattccggttcgtgagattaaacaagtacaatcaagaattgtagttgtaaccgaaaatattagtcgacagcagctacaagatttagcgattcaagatcaatatttaaaagctagctataagattttgcagtaaaggaagggaaaaaatgattattaaagcaccagcttcaacggcaaacttgggtcctggctttgattcacttggcatggctgtttcactttatttggaagtagaagttttaagcttagccgatcgctttcaggtggatcatgtgatgaaaggaattccacatgatgaaaaaaatttaattgttaagactgcactaacagtttatccagggttaccaccgcttcatttacgcgttaaaagcaatatcccattggctcatggtttaggtagcagttcaagtgctatcgcagccggaattgaattggctaatcaaattggtaagctgggactatcagatgaagaaaaggttcaattaggagctaaaatcgagggacatcctgataatattgcaccgactattttgggcggcttggttgttggtgctgaagttaaccatcattttgatgcagttgaagcaccacttcctccatatgcgttggtggcttatgtacccgattataatttggaaactaagacagctagagcagttttgcctaaagaattagcttttggcgtagctacgcatggctcagcagttgctaatactttaattgctagtttgtttgctcaagactaccctaaagcaggagaattaatggaacaagatgtattccatgaagtttaccgagaaaaactagtgccagaacttgtaaaagtgcgggaggtagctcattcaaaacatgccttggcaacttatttgagcggcgcaggttcaacgattatgacgtggattgaagataaacatgtagctggatttttgtcgggcttacgtaaacatgatttaaaagatgagacattaatcttacatcctgatgaacacggtgttcaaattatccaataaaaagactgaccaagcggtcagttttttagtcgtcaaaggttgcagcaaaactatcaccatcgattagcattcttttagcattgacagcataccaataaggaataacttcagtgccattttcttgctctaattcacagtcggccatttttaaaatttggtctaaatttttagcactgatgttagggtagagcttcagtaaagcttcttgagtaatgccactttgtttaaagccactagtgggataattggcagaaaaaatatcagaaaaatcatctaagtcatatctaggcttaaattctccatcaaagtatttgatttcgatgttttcaatttccataaaggcaccaagttgttttgccatgtaagggaacttattagctagttgttcaacagtaaaaccattgtttgctttagttcgtgcattgggatgcagtttaagccaagcttcacgtatattatgactatcttttctttcaataagaaggtctttgactttttgaatagctgcattgtgtctgtttacggctttttgccagtctaatcgattaggatataactgtctatagcggacagacaagggatgatcgattgcgttgtagataaaattcagcttgtcagtggtataagaagttagttcatcgtcacgccacattaattcatagtaagaactcatgaaagacacctttctatttggatagactaattaatattaactgaatagtatcattttttgctccgattaacaaaagtgataaaaatgtctatttagattggtcagaagcaaaacttttgttaaaattaatgtgtttactattagtatttgctcaaaggatttgacaaactatggatcaacttgataagttcaaccgacgctacaattttctttcaaaattgtcagctgccttcttttattcaattgcggttgcagttgccttgaactttttttggacgccggggcatatgtactcgtcaggaatcacgggttttgcgcaattaattaatactgtaagtgaaagatatctaccgtttacattatcaacatcaatgatgtactttcttttgaactttcctttatttatattggcttggttcaagataggacataaatttactttcttcaccatcgttgctgttgttctaggttctatcatgatgcacgctattcaaccttggcagatgcacctggacccactggtttgtgcgatttttggtgcttcgatcaacggtattggaactgggatggcattaaagaacggtatttcaactggtggactcgacattattggtattgtaattaggcaaaaaacgggcattagttacggaaaatttaatatttttattaatttgattattatcgctgctgcgggatacatgtttggttggccacgtgctctttattccgccttgactatttttattaatgggcgagtaattgatgcggtttatacccaacaccagaagatgcaagtaatgattgttactcagcacccacagcatattatcgatggtattcaaaaccggatgcatagaggaattaccattttgcatgatgctgaaggtgcatacagtcatattgaaaagacagttttgattaccattattgatcgatatgatatgtatgatattcgccaaatcgtgcaaggagcagatccgtatgctttcatgagtgttagtgaagttgaaaaagtatatggtcgcttcaaggagcaagaaatcgtttaatggatagcccttaaaccttgatatataaggatttataaatgaaatttgaatcctaggggcacttggggagcaaaactattcaaaaagaagcagaaatgcttcttttttatttggagtggctttttgtaattatggctttattattggtctttgttaaaagtgattaaaaatgatattatttcgattgagggatgttgatatatcgtggatcatttagtgtattctccacgagtgtggaggtgatcctatcatcttgaagggcacgggagacaaggcagagtattctccacgtatgtggaggtgatcctactgttaacggtgatgactggtatccagttagcgtattctccacgagtgtggaggtgatcctactttgagctgtgtcaacgccacagccgtttagtattctccacacatgtggaggtgatccaagtcgttacatcagccaaaagatgaggcttaagtattctccacacatgtggaggctaaatagctgctctgaaaaatatgttctatagagtgactgtttttgtatattatttaaaaatattgttgatggtgcacggagattgcgttcacttatatagtgaaaagatgctaagaaatctaaaatagaatcgagatgaattggtaatctggtaatcgtaagaaggacttagctactaatcgttgtattcaattttgataacaaattaattaaagagcaaaaaatatgaagaattataaatttaataagtttatgtaaaaacagtgtcattaagttaggctattgattttggtgaaaaaacaattaaagcatcatttggctttagacggccagattgatgccctttttggcatatttttctaaatatcattcgcgttacacgtaaaagcgtgtgttgtatatagtgaaaggaggctaagagaatcggagctaagaggtgacaaatatgccgaaagcctataaaattaactcatactggcaaaaatactaaatggtcattaaagttctatcctaaaagagctttgttaactggtgttttgattgtgattgctatagcattatggaaagtgatttttaatggctaaatatacagaagtaaataaaaagtggaatgataaaaatgaggcccgtaagctttacattaataagaggtcaacgacgaaaaactttattttaaatcttgctatcgaagatgatttagaacagattgaaaaggatattgaagaaagacgcaataatttgtaaagaaataaaatgggatacatcatgtaataaaaagtgcatctcatttttatttgtatataatactagttaacttaaaaaagcaataaaattcaaataaaatggaggtatttcaaagaatgacagagaataataaacaagccaaaaccactgataccaaggcaaaacccaacaacgacacagcaatcttcgctggcggttgtttttggtgcatgaatccagcactttagcatctcctccttacgggtacatggctttgagcatatttaactaatacgcagaaatttgaaaaccgaaaaaaaccgaaaactgtttactatacagattaaaaatttaatgactaatttttttatattgatttatattagttacattagaattgttgatattattttcaatagaaaaattctgtagcttattagctaaatcctttttcacttttttagtaatatgcaggtaaattcttctggtaattctggaatcaccatgaccaacacgttgctggattacgtagagaggaacgcccatttcagctaatttagaaacgtgagtgtgtctaaatatgtgagtgacgagtttcttttttattttctgtcttttcatgatacttttaagtactttatttaacttagaattattaaaatagccctcactggttttccagttgtttgtaaaaataaaatcatttgcctttttgtcttcacagtgattttttgcaatagtaatggcttcaggaggtaaggtgacatctctatcaccagcataggttttagcgtttttggtttttatatgacgcttagatggatcaggttcatttctaatagtaattaaagatcctcttacgcgtgcaaaccaagtgccgtctttatcttgtaagatgttctttttttgaattgcggcagcttcaccacatctcataccagtaagatacatccattcaaagaactcttttaaatcaggtcgctttcgctcgtcacaatctttaagtatcctttctaattcattatcgtctaaatatttattttcaatttcttctcgtttttttaatgattcacttttccaactgattttaactttatcaattggattattagaaatataaccgtatttaatgcccatttcataaactacaccgatacatgatttataagagttgacagttgcatttgcatagggatgctcaccatatagcatattgtccaagtacttattgatgaattgtggggtaacattttttgcaattgtatctttaccccattcagaagatattttatttagagtggtttttttacgatagtaggtattgtaagctagctgtttttgagctatttccagatatttatcttttaattctgcaaaagtaatatcagtttctccactttcaagttcaattaacttagtacgaattcttttatcaagaataatttgagcctgttttcgggtttcacgattatttttgccgaatgtgcaactagtttcatgccatttattagttataggatttttatatgattctctgaaaacgtaatttccattcttcaattttctaataaacatgtttttgacctctatttctgctaaaatagagtacgtaaaaggcagtatgtcttttacatacttaatacttatttactgttcaatttttgttcagttcagtttaatgcatctagtatgattgccagatcaaagctaggtgctttccctcacttgttgccagacgggtgagggatttttttgtttcaggtttaacgtcactgtggacgattatctttgttctttccaaaaatctttgtttaaatactctgcacttaattccatttgatcacaaagataatttttttcatcaggatatagctctaagtattgattgatataaatgcctaatcctattctcaattcattgtaggctgttttatcatctgcaatatttaaagcttttgctaaagtgcctaatcgactttttcctttattatttctataatcagccggtgaaatttccattaatgtatgtataactttgttatatggtaactcgtgaattttggaaaaatgattataaatcctgccaccatgtgcagctgtatttctataatcgagatataaagacaacaatgatgtataacccttttcaaaatcaggtaattgttcaattaaagtgggctctaagcctgtcattattgaaattacatttcttttttgatcacctttgagtagctgataccaccaaatcaaattaccaaaatttaatttcttaacaataatccatgggggaatatttccatgtttatctctgtagtgtttaaatggttcagcatttgaatgagtaatacgtttaagaacatctagtaatacatcaataggataagcttcacgacctaatgagcgataatattgtttttttccagttcgataattcgaccgttttagatagctatcttgcaactcagtatatttttcagatattgtgtatgcaactgcttgtcttaaattagattcaaatatttcaagagcagacattacctgagttcttaaatttctatctaaagtaaataacgcaaatatatgctcaaatgtaacattaggcttgaagacatcagcttcgttgtcttcagaaccaactaaaaaataatctttataaccattaataatttcataataaccatatctacgaagattatttttagcggcttcttcattttgaattagtaatccacgactttttaatatacttatttgttgatcaatagttttaaaaggctttgggttcataaaaacacctcaaacacaaaagggacatgtaacaatacatgtcccttttggtctgatcgcatagcgatcacttaacttgattaactttatgttaacctatgtgacttgttgtgtcaagagacattactttgtatcatttagtatcagatagtgtcatttggtaatatttcgtttaataaggagtgccactttctgcttggtgtaattgatccattgcatatttataagcttcatcgcgtaatgcgccagagtaggtattagccttactcaacttctcactgattgaaatattaggattattaaagtaagctacctctgttgctgataaagttcttttatcatatttttcaggagtagtagcaatctttaattttgaatgatgcttagctgcagtctttgcctttttaattgccttgcggtatttattagcattgcgtttgttatacattacaaaccacttggtgttgttgggactaactttactcaaccattcatgccaatgatattgtttagttacattttcaggaatagcaaaatctttaggaatagggttaaatgtccatttttgatgcccatttactccatgatagatttttacaactctacctttttttaaggtttttgtagttaaaattactccattgtctgataagctatcgttgtttgcaattagattgaatttagtattcttagttacaattacttttttaggtgagagccaatatacaaagtgcttgggaagttttgcagcttctgcagtttgaggtgtaattggacttgtagactgttttgtatttgaacatattccaattgcacccataagagcaactgatgcaagaccagcgataatagattttttcaatttcttaacctccaaaagtcaggcttaacgtcactgtggacgataatgtataatattgctaggtgattaaaatgttaaaagatattatttatttcacaaaagaagacggtcaaaacaagctactaatggtatcatccattactgaaggagatgctatggcattagaacattttgacaaagctgattatgaggcttgtactaaaatattaggacataaaccccataatatttataaatttattgatggtatagagtttaaagtcctaagatcttggataaagccttagttgctatactggataatattgtcattgatacactacttaacttcgaagcagcaatttttgtttgatgccaaaccttattatctcgaattgtgtctataaactggcaaccgttccaagttaatccgccacatgaaaacatagcaagtgaattgtaagtgtaagtaggtttaccttggataaagccagcatctagtaattgaagcagggtatatttaatatcatccgcactgtaatgatctgacagtacatcagcagataaaaattgctgaagagagataaacctaccaggtctatgttcttgttcaataaataaaagaacatctcttacacaatcatgatttaaccgcacaattaaaactccttacaaatcataactaactttaataactttgcctaagatacgaccaggattttcttcgttaagaagaataggatcgtattttttattttctggcatcagcattacttgtttaccaacgtgtttaatacgctttaaagtggcttctgtgttgtcgtcaactaagactgcagctatctcatcatcttcgacagtaggttgttcacgtactataactgtagctccatcgggaattttgggctccatggaatcaccttgacatcttaaaacaaaaagtgtgccatcaggtttttcattaaataattcagttgtataaccctcaatgttttgttcagctaagataggtgtgccacaggcaattgtaccaatgatagggatgcgaacggcgtgcatccctgattgagagagtggcttcatgtttgtaggttgtttattaactttaagaatatcaggtgattcaatattgaataatttagccattttctcaatatagcccattctaggtattcttgtaccacgttcccaattataaactgcctgttcagatacatttaatttatctgctaattgagcttgggttaaagaatttttagatctataaaattttatattttcagatatagcactcattttctcacctctttgttattagtataacagttttgttagagaaaataacataaagttaggaaaaagttaggtttttattgaccataacaaaatgttagggtaatatataagacgtaaggaggtggtaaataaatgagtagcaatacaaaaatcactttaaaagctgctagagttaatgcaggattaagtcaaaatgaagctgctaaaagcttgagctcatacttcggtatgcccatttctaggcaaagagtggcttcttttgaaagcaatcctgataaagtgccgcctgcttgggcagaaggattctcaaagatttataacatttctttaggtgatatttcttttacccatagttaaacgttatgttagatttagtaagggggcgatgatatgaaactcacgcttgaaggctcaccaaaggagctgaaggaatttcttagcccgaatgtggatgcgagaaagttgtggaaacaaataaagacatcagcattacagccgatgtctgaaaaacaatattcaaaatggattaaaagttttgctttttcgtccacttcaaaatctcgggataaagagatgcataagcatctaaaacatgaggcttagcatgaattttgacaccataagcttctaaatcatcccagtgattttgaaggattaagagtgtcaaatcatgtgctctttgttcattatcaatcataaaattcaccttcttattcgagtatgaattcattatatgacaaagaaggtgatgaaataaaaatgtggaacgtagtagaaaagatcttaaaagaaagatcacttaccatttatcgtttatcgaaaatgacaggtatttcagataacacacttagaaattatcgaactaagtagtctgatcctagttttactaatgcttgcaagattgctgatgcattaaaggtaagtctagatgatttaagagagaagtaaggaggcgacaaaatgaatattagagaggcttgtttaatggcaaaaaaagaaggtcgtggcataactcgtaaaagttatggcccagaccatcaatatatttgccaaccaatacaacagcttgcgttttaattattccttttgcagaaggacattttaaaaccaaacgctggaatccaaacttggatgatttggttgcaactgattggtatgtatatggctaaaaaagattagttatacagtctgttttctaaagcaaaattgatttgttcagaatctaaaacaactttgggatgaaattccataatgttttgagcgttatcaatcttaaacttaaatctcattttgtcagaaattatgtttgtagatctgagattctgaaagcttattacaaaggttttagacgatctaggtggaatatttaatggagtacagtcactaaagacaaatactttatcattattaaatctagtctgtgatattagttttactggaaaccaagatgattcaacagtttcatcttcatttgtgaaataaatattagtaatcgtcgatggtctagaagacatatttgaaactaacaagcagatatttaattgctgacctagctcataggtccaacgtaaatatacacgtgtctttatatgtttctcgtaataagtattaattgctgaataaagtgagagtgcaaaagctaaagtagctattgcaattgaaacaatttcgtaaggagtcattgagatacctcatggataaaaattacataattgcgattattggagcggtattagccattatagcaataattttagccttaatttagtcattattaaagtcctgaaaggaggtgaaaaatatgtccgataaagagttattagaaaagatgaaaaaatatatcggccgcaagttggatcaggacagtgatcctaacgccatgaaagctatcatttctgaatacatgcacctgaaaggagatgattatagatgatggccaatggctggaaaacaccaaaacaaatccaagaagactacaatctggcagataaaacgtgggcaacttggagaaaacagtgtgaagcatcaccttatgcggatgcaatcgtgagagtgtcgacaagatcgacatttatcattgaaccgttgtggcaaaagtttttgatctggcagtcaaaaaactttgaagaaaaacatttagatccgcacttgcgcgatctgaaagtattaaaggagaactgaactatgacaaaaatgaaaacggtaattgaagtaggtattgtaattggctatgccgctttattcgctttagcgatcattggtttgtactgcaaccctgacgttttatcagttggaatgtaggaggctgcagcatgtcaaacgaaacatttaataatctgttgcagaacagcaatgctttatttgatcgtgataataaaatttggtcaaaagaatcacttttgaccaaaatacaaaaaagcgtgttgcctgaaatcaggtaacacgcacaccaaaaagaatctacaaagattatatcacaaaaggaatcttatttaagaggtaacaccatgccaaaattaaaaagagtatatgacaagagttacatggttattagcaatcatgtttttgaagatcccaatttaacactaaaagcgaaagggttattcggctacttatggtcgagacctgatgactggaacttctttatcaccgaattggttagacactttaagggtggtagagatcaggctatgagcgctttagatgagcttgaaaaagcaggctacttgcttagaagtcgtgttcgaaatgaacttggccaacttactaataaaagtacctggttgctatctgacacacctaaaaagacttggatcgagcaaaagagaaaatctgcagctaagaaaaagatagtcgttaaaaagcaggttcaaaaatctgcttctaagaaacctgtggataagtctactaagcctaagtcggattttcctacacaggcttttcctacgttggataatccgacactactaaatactgacttaactaaatactcatataacaaaatacttaataattttatttatacttcttcttcttcctcctctactacacaaaaccaagtaaatcatgaagatgaagaagaaaagataactcaaacaatgtctaaattatttgaatcaataagattctatgacaaattttacggcacacataatcgaccaaatcttagacaattaagacaaattaggacaagagttgctcagcttcaagaatcaaatagagatgaactatgcaaggcatacgatgaacgaatccgaaatctgtatgttaatagtccaattggctatttgattactatgcttaatcaagaactaaaagatcaagaaatatggaataaggaggcagctaccgatgcagaaaattaatcacgaagacgaaaaaattagtttagctagaaaaaagattttagttttcttacctgctggaattacaactacaccagcttggctgtttgctaaatttacaacatcatccttagctagacgtggaatcagaagagttagtcctgggcttagaacctttaatccagatgaccaagaaaaacgtggccaagttgaatatgtcattcagcaaaataagagtgacagcgttaaaagagttaatgctgatacgccaattagttatcaaggatggggcagatggtcataaatgggcaagaaagaaaaagcaacaattaagaaaatattggactcattacagcaagcagatgatatgacaatggctttagattttattagatctgaaatattacttgtttgtactgaaagtgcaactgcaaatgatggtcatgttgtgactgataaagaaaagaagatagtcataggccgaatgcttatgaaagctttagctctttttaatgatcatgaaatgcctgaattacttcaatcttttaatgctgatgaagaagactttagtcatgatacacacggtaaattacttttaaaaataattgatgctgaattggatcaaatgtgaaaggtagcataaaaatggcaagtaatcgacttgaagatttaaataatatgctttttaaccaactagttaggttagacaaagatgatattagtgatgaagaaatgaacaaggaaattaatcgtagtaaagctatgaatggaatagcccatacgattgtagataatgcacgcgttgtattagatgcagctaaattcatggataaccgtgaagatgctaattctaaattacctcatatgattggagttgatgcacctgatgacaataagaaggtctgatggcacctttgttaaaggtagcatcccttggaataaggggttacatattgatttaagtaatggcaaaggtcagtttaaaaaaggaactattccacctcagcatcatgaagttggctatattgcacatcataaagatggctattcctttatcaaagtagccgaacccaaaaaatggcaattatatcaaaggtatgtatgggaaaaagctcatcgtaccaagttatctaaagatcaaattgttattttcttagatggcaataaagaaaattttgacccagataatttagcagtggttactcgaaaagaattaatgatattaaatcatgaaaaaatgctgactgcagataaagatttatctaaaacgggagttttagtagcaaagctaaagatgaaaattaaggagaaagaaaatggctaaaaagattgtatggcatggaacatttaagaattttaaagcagatgctaagggtaatgtgactcttgctttttcaggaacaggtaacaatatcaattggcaatggctgaatgagtttcgtcaaaatggttctgttcaattagttattactagtgatcaaacagaactagatttagatgataattctgatgattcaaagcaagtggaattatttgatgaaaaaggggagcctaagaatgaatcaaagtgatttcgttagattaatcagtctctacagggatgcccatgttagcttttcttatgatcgtgtaaaaaacactttgcagttgattactatcagttttgaagatgagtgtgatgaaaattactgtgaaatcatagcagactggcacactcggagcacaacaattttgcgttcttcagcattagagcctgatgagttgctgcaggtttcttacgttatgaaattgctcgttgactttttatataaaggagtagttgatgatggatcaaaagaaatggaataatcgaactccttttataccaggtaaatcttatatacctgcaaagttgtttgcaaagtattctgcagcagatttattaaagtatggtttacgcaaatggcctgatggaactgcagttgaaattaatgctggaatttttagccatgcaagattgctagtcccaatgaagcagaaaataacttttcaaggtccaaattggtatatagatgtagaagggtatacccatgaagattaaaagtatcaaaattaatttaaataaagagcgactagacacagttatgaaagctatgcgtgcgatcgaacatgaaaataaagccgaattctataaagcttgcgatcaaattgtagcagatacaggaactagtaaagacgacgttgtttttcatattttatgttctacgtataaaaatgcaatttcaatgttaatggcaaaaggttaggtgagttaagtgactgaagaattactaaaaattcaagttaagaatgatcagcaattggtatccgcgcgtgatttacatcgtggacttggattaacaactagatttagtaaatgggttgagcaaaattttaaagattttgaactaggtgaagattatacaagcgtaactgcagttacggtagttggaaatggtggtcacaagccgatccaagattatgccttaacaatcgatatggccaaacaactatgcttaatgagtcataccgataaaggaagagaatatcgtaaatatctaattgaaattgaaagaaagtggaatgatccacaagaaattgttagacgtggttatgcaattcttcagaatgagaatactcaattaaagattgagaatcatcaaatgaagcctaaagcattatttgcagatgccgtaacagcttctaatcgaaccattctaatcaatgatcttgctaaaatcttaaagcaaaatggtgtgcagattggtggtgttcgtttatatcgctggctaagagagcacggttacttaattaagagacgcggatcagattataactctccaacgcaaaaatccatggaacgaggtctctttcgtgttaaagagtctgtaattactcattcagatggtcatacgactattagcaagacttctaaggtaactggcaaaggtcaaatctatttcgttaataagtttttgaatagtgataatcctgatacggcacaatttagggaggaaaaataatgaaaccttgtgatttttgtaatttcaaaaatagagatcgtcaaacatacgtaatttactatcgaaagaaaaatgatcctacacatcagagaaattttttgttttgctatcttaacaataaaggtgaactagaaattgacgggaaagatattgaaggacatactgatgaaccagttaatttttgccctaattgcaggagagatttaaatgatgaagattaagtattacttcgaatcagcatggcactggtggtggtctatttggaaatgatgctttggatagttaatcacttaaatgacattatctttgtcgtgtggaccgtgttgctggctatgaacatgtattctaatcataagaatgaaaagtccaaccaggagcttttagatgagattcataatagcaatgatttaaacgacaaattgcttaacacggttaaggaatacatgcaaacaacagataaaaaagcaacaactcaagacaacattttgtgggacagtatcattattttggctaaaagaattcatgatttggaggataactactttgttaaataagaaaaaatggatttcatttgataaaaatggcaaaagcatttatgctgattcaattgttcatgatgaagaagcagatgaatatttcatccctactgaaaagaatggtctttatggggatgaattccttggggatttttatttattagagcctaagaaacttacagtaattagttcccatacttcaatggatgatctaaaaaggatgatgaaaaaagataaaacctcaggtgcagtttacaatgttggaggtaactttaatgtctaatccagtggccgatggctggaaaaattatttgcactattttgcaaaactaggtagggaagttgatcaaatgaaagaaaatattgatattcaagttggaaccaaaaaatcaaaagagacatggaataaaacatataaatcagttttcttagcaaacaatggctggaaattttatgaactttcaggaattagattttgccagtatcttgctacagttcaaactaaacatggtgaattggttgttcatgatggtgattcaattacatatctaggccataacttgtgggatgtacgtaaaggataataatcatgaagattaatattgatgatttagatatttatcaaaagacctggaactacgggatgcagaagattgctgcaagtattattgctgcagcatataacttgaattctggcgatgttccaattacaaaaacggattatcatcatcttgtatttaaaggatttaatccaatggatatgaatgagagttttgaaattcagttgaagatagttcctaaaataagctttaagcatagtagtcatgaatagctaatcacaaacagttttagggatgcatgaattaatgaggtaggttaagcaaaatgtattatttaaaagaatttgagcattgggatcgtaaaaagactgcagctaatgttcaacagtttcttactaatgattttcctataattatgagtagagctgataaacagattacagatattactagcccacaattaaatagcatccctagtcacactaatggtaattcacaagagaaaaaggttttagatcatattaactatgttgctgtgtttttatgtgttgctgatacatatgctcatatgtctaatgatggtaggaagtatagagagatcattaaattattatgtctttacaagttagatagaaatactgtttctaacagattgggaatagatacttcaactttggataaaagaaaagttggtgctctgtgtgaatttgctaatcgatttgaagttcagaaaaagaggcatgaacaccaagtagattggattcctaattttagagttccaaaataaatacaaatctgatacaagattcatacaactttcgtacaacatttatccaactttgatacaagatttatacaacattcatctaacatttatccgaacataatgagttattatgatattgtgaattaattgagagaaattgattcgcactcttgatacggtaagtcatgtacttaacctccttttgtgattttaaatagcaggcttagtaaattactattggctgctattattatgagagtttagtctaataggtaagacgtcaaacattgcctgaagatgcaggttcaaatcctgtaactcccttttgaatatttattgtagtaatgaattttaatttataagtttgttttatgattgacatcatggtaaggtatatcgattaataaatattcagtacatatttatgtaacggaagcatcttagtaatactgagtgtgtaggttcaattcctacaatatgtatagatggctttaagtcatcaggatcgaacgtgtcaaacggtcaatgaagaagcaattgaggtttcagttgcttctttttattttcacaataaggagtatgtaaaatgccacgagtaaggcgatgcaagtatctaggctgtcatgcatttgctgttatgcctaatcactattgtcaaacacatattagtcatgaacaggaatatcttgacagaagaaataaatatcatgaatctaaacaaacacgttggaaatataatcatgtaacacgttatcgtaattcaactaaggcaaagcaaaataagttttatcatacccgtgtttggaagaacctcagaaaggtagttctccaaagagattaccacctctgtagatattgccttaagggaactggaactatagtagatcacattgttccagttgaatttgatattaatcaaattgataacgttaataatttagttacatgctgtcgtgactgtcacgcgaagaagacacggtgggaacaaaaatattatgggactggtttgcataatcaaattaaacccgttcctgagattacggacattaaaacaatttctaaattaatgaatgttccagacgggtatgagaagcccttagagcaatttaatttttgaagtccatagtttatcaaaacataattttttaatgccccgccccatgttttgcttcttagggagccgcaacagtgtcgttttcttgtgatgcgcaaacatttttgaaactttttgataggggggtcaaatttggcgaaagttgatttatcaaggccgaaagtgcctacacaagctccaaaatggcttgataagtacggaaaacttttatggccaaagatggccaactatcttaataaaaatcctaaagtcctgcgtgcagatgaatatttattgcagcagtattgttcagcatatgatgtctatcgtagagctcaacaatctcttaaagatgatggactgcagcagaaaatgtttaagacggtagttaaccctgtgactggtgaggtaattaatcgagattttgccggctatagaaaaaatccggcttatcagatgatgtctgactcattatcaaagttaaattcaattggtcgtgagcttggattgagtcctaaagcacgatcagaaatgatagagtacaaggcaccagatgagaagaaacaatcaattacagattcaatgaaggagttctttaaaaaatgaattggattaataattatgcacaattgaaatattttgaggagatacttggtttaataattggtggaattgtatttatagtgattttcattctatggctggttatgtggtttaaggattatagaaaatggaaaagataataggaataatttttatcataattgctttatttgcactaattcaagaaggaaaagattgatgctttatttcaaatttaaagatgacaaatggtttgaagctaaatcaagaagctttgcttatatggcttataatttaagctatgttagttctcggctactacttatgagttttactaaagatgaaactcaagcaatgatacaaatattttctaaaaataactagcaaaacattagcttattaatatggaggtggtaaatgtaatgaaaattgatttaacacaaacgcatgatgtacaaggtgcctttgaagcagttaattggacggacattgccaccaaatataccgatcgtggtactaaatactgtttcgctgttttacatggaccagtaatggcaccatataaaattaaattagcttgttttcggcatttaagagatttgcaacgtcaggatcaacgtgattttccttatcattatgacattgcggagctggatcgctttttgaagtttgctgctatcgttcctgaagctaaatcaaataaacctgtagccttaaccgactcacaggtttttattttttctcaattagttgcgtggaaagataaaaacaatcaaaaacgatatactaggggaattttgtcaatggctcggcacaatggaaaatcatttcttatgggtgtctatatggcttatacatttttgattgcatctattggattaaagaatcaagattacctaatttcatcaatcaattttaagcaaacatctaaattaatgggttatgttaagaccacactgagtcacattatccaaattgagccatttaagtcttatgccaaagaatgtggtattgatccaaagagtttaagttcacaagcatctcaagtcagaatgagaaattctaataatacaattcatgctattacttataattctggaagttatgatggcttccacttcactttggccataggagatgaatttggtaaagttgctgacacccaaggagtatcagatattacgactggtcaaaatggccaagacaatcatcaatttattcaaatttcaacagcgtatcctgatcctagtgttccttttcatagggatgaagttaaggctgttgaagcaatggaaagagattgggatcgaacaagtggtgataactatctttgcttagtgtgggagcaagatagtaaagaagaattattcgaacctgataaatgggttaaatcgaatccgctcatttactgtaaaccgcaaatgaaaaaagatttgatcactgatcgtggaaatgctttgttaactgattcagttgataaatttcaaaataaatctctaaacatttggcttgagcaatctagggatagttttcttaaattagatgatgttgagagcgcaattctagaggactttacaatagataatcgtgaggtattcatcggatttgactactcaatgttctctgataacactgcaattagttttgcatttccatatggtgatggaaaatttcattttatgcagcattcatttattccatttcaaaaagcaggttcgattgaagtaaaagaaaatcaggatggactaccatatcgtgagttggccaaaaaaggatattgtgatattacagaacatccagatggcattatcaatcctgaacaagtttataaatggctgcttcaattcgtagaagaacatcatctacaagtggttttctttggctatgatcgctggggatcattccaggttaaacaaatagtggagtcattaaacgtaaatactaattggaatattatggatattcagcaaactacactgcagttggccaacccaacaaaatttttagaagagcaatttattactcataaagctacgataaatgatgatcctatcatgaaaaaggcattgctgaatgctgtagttaaagaagataaagttggtattcaaatagataagatgaaagcaactctaaaaattgatgtggtcgatgctttaattgatgccttatttcaagggatgtattattacgatgaaaatgctgatattaattctaaggaaacggaagtagatagaatgactgaacaacaggttcttgactggtttaaaaatccaaattcgggactaggagatgattaaactgacaaaaaaagttttaaaaaaattatggttatacagtgatatcattgcttggattttggcaatgattttcttttgtattgcattttttactatcaataatacatttggacttttttcaataggaattagtttggttgttttaggctatgtttttgaattcattggcagaagtaaggggaatagcagtaaaggaggtgaataaaaatgccaatttttaatcaagctcctaccaataaatctgctatttctctgaacgatgatcctggtatttggtctgcattaaataagactgaagatgagtatgtatctgcagataatgctctggaatactctgatatttattccttgttgtcacagttatctggagacttagtattagtaaaatataaggctgataaatctagagcacagtcattaattgataatccaactggtacaaccaatggagccgcattttggcaatcaatgtttatgcagttgcttttagtcatgtggtaataagtcaatgtaaaagttaaattttatttttaattagtttgttttaaaaccaaaatttgcgtgcatgaaactaagccctatttcaagggattttttaacaactattatttactcctccaaaaatgttttagaccaattaatcacctcggtgtttgatagatttgaccatttttgagcagagtgaaaatggtcctggttaattttcttgcacaaagaacgcaagcgcgtttatgcggagaatagaaagcttcatcgtatttcttttgatagtacttccgaaaaacgggatctctttgtctaatcaggttggcagcttcaaccaaataatatcttagataatgatttccgtttttagtcatcggtttgtgttcgctatcaaaattactagattgcttttgacgccaagctagaccagcgtatttagctagctgtgcttcagtgtcaaagcgatcaatactgccgatttcagcgataataccagcggaataaactgacccaattcctggaatagattgtagtattctctcttcaggaagcgtttggacgatatctgtaattgctttatctaagttcttaatcaatttctgattagttttaatttcggcatagtaaacagataatacggcatcaatcgagtctttcatgactttacctaagcgatatgatcctctaacggcttttctgatcgctttagctaaagtctctggatcagagaagcggccacgtcctttggtttgaaggtagtcaattagatcctcgattggcatttcagcgatttcatcgatggttttactatcagtaacaattgacagcatcgttgcgccaaagatagaagttttaatattgtctttgtcaacggtaactagtttgtttacacgataataaagagtttcaatgaagtgctgcttagctctagtgagcgaagatgtgatttcatatctagctctagttaaacgctgtaaagctaagtattcctcttgccgagcaatagtgacatggtatttaccaaagcgtaagtattcagcgatgtaataggcatcagtaggatcattcttattttcttcgtaaacgtcatgaaatcgtttagtgtttttaggattaatgacatcagtttcaagattaattttttgtaaatcttcgtcattggcaaagaaataagcagggtgaaagctatagattgaagtggcttccatgccgataattactttgtcatagctgttctgtttagcaagttgaagaattatctttttgacctcattagcaccaatcaggtcattagaaaaagattggttaagtaaaggtttttgataattttctgagtcagtaatagcgacttgaagatcttttgaactaacgtcaattccgataaaaagtttcattgagaatggcctcctttctagcaaatatttggtcatagatcgatcatcacatgttagtccctaattacagattctaagacaatctcgcaaaatataagtattcataggttcaagctaaaaagctgcgactgaatctgctctgaatcagtaatagccagaatcgatacagcatgtgagtaagtcattagtaaaactgcttgggcggcagactaaaaaagtagtcaaagctacagaaggaaacaacctataccaattgaccaaggtcaatgacaattagagactagcatctgatgatcgaataaacaaactaaaagaataatcattatcactgatttaatttatataatacgagatggaaatgcttatgcgtatcgctggcgaaatattaacggtgttgacttgcgttgggagtttttacggccatcacaagtacaaccatatttattaagcgatggatcaggtatgtattacaacgtaagttttgatgaacctgaaattggaactaagatgtatattccacaatcagatatgattcatattcgattagcatctaagaatggtggcttgactggtgtatctccactgaagtcattaaagcctgaaactcaattaaaatcagcatcaaataaaatggccttaagagctttaaagcaatcagttatggttaatggtgtgctaaagattaagcatggtgggttgctagattgggctacacgtgcttcacgttctcgtaaggctaaagcgcaaattgataactctaatggtggtccatttgttatcgatgatttggaagactatcagcccttagaagttaaatctaatattgctaatcttttaaaacaagtagattggactggttctcagattgccaaagtatatggtgttccagattcatttattaatggccaaggtgaccaacagagttcaattgcacaaattagcaatcagtatgtaaaagctttaaatcgttatgtgactccgattgtaagtgagttaaacaacaagcttaatattcatattgataaagatttacgaccggcaattgatgttttaggcgataattttgctactactatctctagtttaaaaaaggatggtacattagcaggcaatcaagctcgatacgttttgcagaaatcaggatttttgccggatgatcttcctcagccagatttaactgcagaaatgacagctaaaggaggtgatgataatggaaacactggaagtcaagggaataatcgtacctaatgatttgagcgatgtctatgattggatgggctatgattcagtaagtcctagtagtattagggatgctttgaatcaagctagcggtcaagatattgtggtagagattaattctcgtggtggctatgtggatgcaggatcagagatttatactgagttgaaaaaatatcaaggcaatattgatattcaaattgttggttatgcctgttctgctgcaagttggattgctttagccggcgacacagttgaaatgtctcctacggctcaacttatgattcatagagcatcaggaggggccgatggtaacgttgatgatcttgctagtgccatgcaagggttagatcaaatggatcaagccttagttgatttgtatgccaaacggactggtaaatcagcccaggaagtatatcaactaatggctaaagagtcctggatgaatgctaaaaccgcagtagcaaatggttttgttgattcgataatgtttgaagatgaacaaatgccagctgtagtaaatgctgatggtgtccctattttaagcaaccaagtaattaataaaattaagaacttgattaaagaacctaaactacaaaataaaaataagccaaagagacaagttaagaatgaaaacttgtctctcttattatggagttaacaagaaagaagataagaaatgaacggaaaaacaattaatcagttgcatgatgactggatttctgctggtcaaaaagtaactgatcttttaaacaagaaaattggcttaaatgaaaagtataagtcttcatataattctatgtctgatgaagaaaaagctaatttccggaaggaaatggagcaagctaagcaagattatgatgctgcagttcaagctcgtgattttgctaaaggtacgtttgaagatgctcaagaagctatgaagactatgcctaagccaactaatggtgtacctgtagaaaaacataattctaagagcaactttgccgatgggtttagagatatgcttcgtcatcctatgaaatacatggaaaacatcgctactagtgacccgaatgaacctaacactttaggtttagctattcctgatgatcaacaaactaaaattaatactttagaacgtcaatatgattctttaaaagatttaattactgttgaaaatgttggaactgatcatggttcaagagatttggaaaagctgtcagaaattaagccaatgccacgtcttgaccaatttgatgatcaatctgatggtacaaagaaaaagaattataacaagagccaaaatactgatattcctgaaggggattatccatctattaagaaaattaattatgtaattggtgactatggtgccattttctatgcaagtaatgatttacttaatgattctgatgctaacgttgaagattacttaaatagacacattgcattaaagaatacagttacatataatcatgagattattagcagattgcctcaatcccaaaacaaagctactttaaagactttggatgatattagtgatgctgttatggacttagatatggcactttgggatggctctgtcttattgattaataaatctgcatttaaggctttaaaagaagttcgtttagcagatggtcatcatgcacttacaactgatgcaagaactaatatcacaacgtttaagttagatgaatcaacgtatgcagtagttcgcgtagttgaagatagatggttacctgataataagacagctgcaggcaagttccaaagtcatccgttttactatggtaattttaaagaatttttacacctctttgatcgtcaacaaccacaattacttacttcaaatattgctgcacatgcatttgaaagaaatcaaactgctattagatcattacttagaatggatcttcaagtgtgggatgatgaagcaattatttcaggttcatttgataagattgctagtcaacctctcattttttcatctgtaggggtaccaagtagcactgatgctgctgatgatgcgaataagaagagcggacaataaatagaaggtgatctaaatggccaaagtacaattttatttgaccattaaagatggtcttgaagatcttctaggttatatagatgatgatttaactgaagaaatgaagacccgcatgattacttgcttaaatgcagctgaaagctttgttcaaggttccgttggacctgatgatggtaatttctatcaaaaaaatggcgtaaaaaatctttatactgttgcttgtaattcctatgctgctacgttgtttacctatgcttcaacaatatctgtaagaagagtaaataatgttgatgatgtttgtcgcagcatcattggtcaattacgtggtaaatatgatgctaaagacgatgaggtgaataatgatggtacggaacatcaatccgacatctctaacggtgttaattaaattcggtaaacctgaaatgaaattaaatgaaggtactggaaacactgaaaatactggtattaaagtaaaatttagaacacgcggtagaagatattctttgccaattactcagcaatttgaacattctgatgttaactggcggcaaacttttgtttatgtagtacatcatcgaagagattggtccgaagttacatatgcagagatcaatggacagatgtatcaagttactggaattaatcctgactcagctaatttgcctaatagttatgatcagataacacttactcgaattgtagaaggtgaagagagtgatggataattttgaaaagcaacttaatcagtttatggaagaaataaaaaaacaagtacccaataagaaacaaaaacaggtagcaactttagctggtgcaaaagtttgggctgatagtttatctcatgaagctaagcaaaaacactattctaatcataaggataaagtttatggccatatggctgataatgttaaggtgtcaggcaaaaacatagatggtatggttgatggttcagcaacggtaggctgggataaaagaatacatgcaatgaatgccctgtatactaatgatggaactgtaaaaatgcgtggtgatcattgggttgatgaagctcgaaaaagctttaatcctgaggtgtttaaggctgagatagctgcccttaaggagatggagaaatgatttcaccacctataacagaagtttataaattaatcgctaaacaagattatgattggttagatttattagcatcaggtaataaagcgccagatgcgacaggaaaatatacttcaattcttattcagaatgctgatgaaacacctgatggcatcaggaataatcgttcaactttgattcgatttagaattgaaatacaaattttctttaaaaaaggttttagtcaaaatatttatgaaaaaagacaagtcatagaagatttgcttcaggatgatggctggattctttcagatgaaagacctccggtaccagatcccaaaacacagcaaacttttatgactatttattttataaaaaattataggagaaaataatgagtgaaaaattaggtagtgcagctcatggtattgatttaactattttgagcggtatttcagaacaagatggtcaagttgttaaaggcgataatggtttaactcaagatggtccttatgccgttgatgcaggtattgaaggtgcaactcaagttgaatatcaaactttggaagcagccggtacagatcaatttgctaacaacaagcgtaaacgtactactagaccaagccaaaacccaacagcaacagtaacttacttagacattgattgggatgttttgaacaaggtagttggttatgaagaagatgaaactggtggtgcaactcttgatcaagatcacaaaccacatatttcattgttaacgcgtgaaccactattggacggtaatttcttatatgaagcatttgctaatgctacagcaacttaccaaacttctactcacgctactgataatacagaagaacaagatgccaacgttcaattgagtttaaaggcatatgaaccaatcgcagatgttttcaagcttaagagtggtaagaagatgccttataagaagtggaattcaggttctaagaagttcgatgaagctaagatgcttcaagaagtattccctggaactaccgcaaaaacagtagatgacattcttaaagcaagcacaattaagacctcaagtgcaggcggtaatccaacaccaggtaattcaggtggttctactagtggtacaaacacaggttcaggaactgattcagaaaagaagacagaaaatagtcactaattaaaacgctgggtgggagtggaaggtaaatcgtttttagtcagcaaatcaatttaattattttttgaaaggaaaatactatgccaattcaaattgatacaacaccattttcaagcattattaacaaaaagactattggagttgaaccaacaggagccatctttgataaggctcaagatattcaaattgagttaatggatggagacattaagcgtaaggaaaccttcttggaatttaagaagcgtgatcgtcaaactgctaaagacgtaaaagaatttattaagaagacattgtctttaacaactaagcaatgggataagataaatgaaactattgataatgatgtactaatgaaatttggcatgtatatggctttagctcttcaaggcgctgaatacgattcttatcaagactatgttgattttattaatcaacaagctgaagaggatgctgatacagacccaaaatcctccaatacaaacgaagaaaattagtttttgagttaaaaaatagaagattagataagaagcgtttgcgtaaggaaatgttcttgaagcatggaatagctcctgatttttggaagaaaaccaatgtctttgaattgatggatattcttaatgttccagataaaaatccacaactaccagttgcgcatgatggtggcttttacgataacgctgattgggctgaataagccctttttattttgcgctggaaaggaggaaaaatgagaattcaaaacgtaatggccacgagtatcaaaattgatactgtgagtgctactcagtcattgcgttctatgaacacagcattaaaggcttcaacaaatgcatggaaagccgaagaagttcaagctaaaagtgttggtaactaccttaaggcatctcaagcaaggtatgaaggcctaggacgttcaattgatcaagctaaagaaaagatcaaattaattcaagaacgacaaaaagctcttgatcttacaactgaagatggccgaaatagttataaccgctatgctaagcaacttggaataaccgttaagcagttgagttcaatgacagctcaacaagaacgtgctaaatcagctatgcagtatcaaacttctggtttagctagccttcaatcaaggtatcgatcacttaatgaagttaatagttcatatgtgaagcgattagaagcagaaggtaaaaagtatgaagctgcaaagacaaggttaactagttataaatcagctgtcgaaaatttaactaagcaacaaaaaattcaagagagtgaactttcaagaattgctagtgaatctggaaaagctagttcggcttatcatgctcaagaagttaaagttaatcaaactgctacaagcattagtaaattaaattctaaagttaaatctgctcaatctgaagtaaataaacttaatccaaatggctttaataagattgctaatggtgccaaacatgtaactaatgcagctgataagatgaagtccagcttaaaaaatacgtgggaacacgttaagtctggtgctactgctgcagctgctggtattggagctgtgggagctgctgcaattagtggagcaaaaaaggctggtaacttagagcaatcctataaggaaatcactaacttagccgttactggcggtgaaaaacaaaaggaagcaattaaaaatgtttctgaaatgcaacgccaaggccgagctatgtcaatccagtatggtaagtctcaacaagatattgctgattcctatgaggaattagttaaaagaggatataccactaagcaagcattaggtgctatgcgaaccgaattacaggctagtgttgcatcaggtgatgactttaaagatgttgttgctgtatcaagtacaactcttgagtcatttgggatgcgtgctaagaccacggctcaaatgacttataacaccaagcgtgcagtaaatgagttagcctatgctgctgatatgacttctaccggtttcaaagacttagggtatgggatgtcctatgttggatcatccgctcaccaagccggttttggtttatctcaaactgcagctgctatgggtattcttagcaataacggtttggaagcatctaaagctggtactggattaaatgaagttatcaaccgcttatctactgctactggtaatttgctcaaaggtgacaagaagaatgctcttgcaaaattaggtattaagcctaaagaaattactacttctactggtaaattaaaagatctttcaactgtatttggtgttttaaataaacacatgcagggaatgtcaaaggtccaaaagatcaacatcatgaaatccctatttgggatgaccggagaacaagcaggtttaatcttaactaagtacaacaaacaacttggtaccttatctaagcaaactctcaaagctggtaaagatggagattatgttgctaagttagctaagaaaaactctgaaactgccaaaatgcagatggcacgtcttaagatgactggcgaagccttcagcatgactcttggggcaaaaatgttaccagcaattaatagagctggtgatagtcttgtaatctttcttactaaaacaaaagatggtaagaaattaacacaagattttgctaatggtgttggtgcagttgctaatgggttggttgaccttattaaatgggctactactcataaaaccgaagttaagtggatctttggtggacttttaacaggatattcagttgttaaaggcgctcaatttttacagtttttaaataaaactcggttggccatgtctgaacttggggttttaagtaaatcaaagactgcaattaaaggcgtgggaacagcatttaagtttactgccaaattagcaaaagctggtggtaaagggatcctaacggctggaaaagcatttggaaaatcctttatccaaagtgctaaaggagctggaagtgctattaaatctgttggttccattttaggtaagggagccaaaagagttggtagtgatctagttgattctgaaaaattccttggtaagcaattagtaaagggattcaaaggctcggttaagctaggaaaatcaattggatcatctctagttaatggtgctaaatccttagttacaaaatctgtttctcttggcaaaaaaataggttcagctatttcaaagggtgcaaaatcaacttttaaatttagtgaaagcttatttgaaaaaggtaatagtgcaggtaaactaactgggcttctgcaatctgctcattctgctggtggttttaagaatttaactacagctggcaaagtcggaaccggtttagccggagctggtgttgctgttgataccgctacttcaattgttaaagcaattaaagataaagttggtagtcgtaagcagtatgaagatgtcggcacttctgctggtaaaggcatcggtggagcgattggactatggtttggtggtccagccggtgcagctgttggagctactattggtgccaaggttggtaaatggggcggtgacgctgtcaagtcatttaccaacggttggaaatccaagaaaccacctaaaaacttctggagtttagaaaatttaggttggagcacaaaagacactttcagcaaaattggtaagtgggggcaaggagtaggtcaaaagtttggccaaggtcttaataaaggtaaatcctttgctaagaagaacgccaaagagcttgccttaactgctgtttcaccaatgcttggaattccagcgcttctttataagaacaatccaaagttcagaaaatgggctaatggtgttggtaaaagcgtcaaaaagggatttaattccgtaaagaagaatgtaggtaatttcaataaatcagtttctaaaaatgttggtaattttactaaatcagttggtaaaaagtatcggcaattcacttcttctgcatctaagactttcaagaaacattgggatcagatatataaacatagttctaagggaaccaagcagatcatgcggtctactgagaagtttggtaagaactatgtaaagattaataagaagtatggtgatgaaactagaaaaaactttggatcctttagtaaacgattaaagaaaaatcatggtgatttattcaagacaattggtcagacaacaaaaactcaattaaatattgagaaaaagcgttggtctgctagttggaaaaatattagatcctttactggtggcgtttggaaaggccttaccaaaaatgccggtgatatgtataaatcacttaattccaaaactcatggtggcctaggtaaagtacttactaaatttaaagcatttggcaaaagtgttggtgacttctggaataatctttggaagggagtcagggatacttttgatagaaccattaagggattaaaggatgctgcaggcaatgtaggtaagttctttacaggcaaattaaaagtaggaaatattcaccttgctgatggtaccgattggaagaagaagtatggctatcctgcaattgttaatgatggttcagattctccagaaaccaataatcgtgaaggattaattgataccgatggaactttaaagatattccctaatgttcgaaatctaaagtggtggatgttacctggtcaacacgttgttaatgctcatgatttagcaacaatgtttggtagtggtgttcacttagcttctggaacacttgattttgatttgctgaaaaattacaagatcggggatgtaaaaactccaaatctattaagcaaattagtaaagatcaattctcaaagtctaaagctaaaattaaaaacttatgctgaggataaagaacgtcacgaaaagacaaagcgtagacgtgaaaagaaagaccggaaggctaagcgaaccactagaactagaaaaggtatggaatacctggattcaagtttctttactggtggtaagtcaacaggcaagattgtttctgtttcaaaatcatggctaaagaaatatcttgaatctaaacttccaaagagatctaggaaacgaacacgtactactagacataaatcttcatcttcaagatcatctagcaggtcaagaaatacaacaactacacgcagagaaagaacttctgttagtgcaagtgtaagtggattaagttctgtaagaagtttagctgcagcaattaaagctgtatctggtagtcatactgcaaagataactgtttctgcaagtagtgccaaatcagtaaaatcactaaaagctgcattaagtaaagttaaatctaaacgaattaaagtttctatttcaggaactaaatcggttaagtcattattaagtgcacttaaaggagttggtaagaagagtactcttaaaggtattagttctgcatcaagtcgattaaggaccttaagtaaaagaactaaatcaactaagagttcaattaaaggcttatcatcggctaatagtaaggcaagtaaaaccaataagactttagctagtcgattatcaaagactagttcaaaggtaaaatccttatataaatcagccaaaaagaacaaatttggtaaagaaattaagtctcaagctcaaaccgctgttaaatctcttaaaggaaaaggcaattttgctcaaacctttgaaagaatgactaagaagtttgataaagatttaaagattatgtcgaagaattcaagaaaagaatttaaatcgatgtggtctagcatcgaaaaaacttctaaatctggtgaaaatgctactcataaatcacttaacagctttagtagcaagtacagacgtggttggaaatcactagagtctggtgtctcaactaccttcaatcacttctggacgactatgagaaaaacggctggtaagggacttaataaagttatcgatgttcttaattctggtattggaaagatcgatacagttattggtaactttggtggtaataagaacgcagtccataaagttggtggtgtccactatgcaactggtactggttacttaggatcacaaagaagaccaataactggtccaactctagcaatacttaatgatggctttgacagccctgaaaccggtaatcgtgaaggggtttacgataaaacaacaggtgaattatctgttgtaaatggtcgtaacgttcctttggttcttgatcaaagacatgaagtatttaatgcttctgaaatgcgtgatcttggcgtaactagacactttgcttcaggtacaggctggttaaagaagctttatgaggaagccaaaaagttctggaaacaacctatcaaaactgctgaagctaactttggtaaagttactggcttaagtggggctgttaataccttaactaaaggtatgatgaaagttgctactagccaatcaaccaagtggtggtctcagctctggaaaatggttcaagataaagtcaatgatgatgatcttggacccgcatcaggtttattaaaagccgttgaaaaactaggacgcggtacttcttatagtcaagctagacgttatggcccgaattcatatgattgttctggtcttgtatcaaaggctatgaatgagtattatcacaagaattggggacctttaacggtagctggattgtggccacatgctcataaaatttcacgttcataagcaagacctggtgatccaattttctggcttccaaattatcacgttggagtttacgctggtggtgataaatattggtcagcattttcaccttcagcccatccacaagtagggatgcattctattgcaggatcagttccaggtgtgaaaccaactttcgcacgatttaatggaacaaatactagtggtaatgattcaagtaacaaagatgtgaaagtaaaagcaaataatgctttacaaaaattcataaaacctcaagtaggtaaaggattttggcagattatccagaaaattcatgataagtatggtgataaaggcgtattattaaatggttttgctattggtgaaggtgctcctgcaagagcaaaggcattagccaaagctttaaagcgtcttgatccacgagctactagaaatggtattgccgctattttagggaattggttctttgaatctggtggactcaatccaggaatttccaattctgctggagcaattggattaggtcaatggttagatagagggccagcattaagagcctatgctcgtaggcatggtaaaagttggaaagatccagcaacgcaattgaattttgccatgtatggtgatagtgctaatacatctatttttaagagaatcttggaaggtcatggatcaatttccagtttagcagctgcgttttctagagaatgggaacgtggtggatatgattctcaacatgttcaaggtgctaatactgttagaaaaattcttgggtatgctaacggtggcattgttacaaatccacaaattgacgtagttggtgaaggtaacggccctgaaactatagttccttgggatattactaagagagctagagcttataggctgatagatagaaccttaaagcatttcaagcaacaagatgctccaaccagtcaaggtgaagattctaagctactacttgaaattcttaaggttatgacatcaattgaaaagaaacttgattctgaaattactgaaacaagaagattaggtgaacaaccaatcaatgtatctggtgactttaatgtagatggtcggaagtttgctagatacttaagaacttatttaagagaattcgatcgccaaactgttgttagagggaggtataacttaagtgacagataatattggttatattagctatcatggtaaatctagtgccgattttggttttggcataaatattgatagtaaaagagtgcattcagcgccaaacttaacttttaatcaaataccatctagctcaattgaaaatattttcagcaatgctcacagcagaagtcccactgatgtgagcttttcttgtacaatcgatcgtccggaaagatttgaagacatggatgatcttgaagatgcagtaatggattggcttgatggaagcgagtatgctccacttagattgagttggaagccgacgtacatttatatggccatagtaagtacagcaccagattttactcagtctcaagatgatatggaaagccatgagattgcaacgattactttccatatgcagccgcttaaatatcgtgctgatgggtattactggcagtctttgcctaagaatggacaaattgttaatcctgaaagattgaaagcttatccagattggcattttaaaggtactggtaattttgtattaacagtaaatgggatgccgtatcaatttaacaatattgatggggattgctacctggacggattgtcagcagattgttttcaagatcaggcaacgtctttaaatgaaaatgtcgtgcttacaaataacgatgcaccagtttttgagcatgggcttaatacgattaagtttgaacctcaaactgatgcttctttagatttaattgaatggaaaccgaattggaggcgaattctttaatggttgaaactgcaacttttgatcaattgaaacaagaatatggtgcttcagaagctgatgatcaagcagatacagtttactatttgaggcatccaattctttatgctaatgctgttgatgatgatgaaactaatggattaggtcctttgccggactttgaatcattaacaatcaatagtgttacttctcaatatccaacaggtcagggtgtttatcctattgatggaaaaaactttgataaacttgctgaacgtgaagtaattatgactgatggaggacctgatgcattgcatcagaaataccggatcatgaatattactaaaacggttggctcagaaaataccgttactattgatctaagacatattgatggtgacctagctgacttaactattgatgataatattcaacttcaaggtgcaagtgctattgaagcatttaatgcgatcgatcaacatttaactgcagcaaatccaggtatcagatttgattctgatgttagttcattatctgatgttaatttttcaatggatactccagctggaaatttacttactgatcctgatgctgaaggtgattcagcaactcaatcaattcttggtttgttcggtggcgagttagtttttgataactggcagatccatcactatcaacaagcaggaagggatatcaataagcctttaaaggttggtcgtgatattcaaagtctttcatcaacaactaatgttgaaagtacttatactgcaatttatccctatgtaacatataaatctgcacctcctcaggcaacagaagataatgttgattggagtagttatgctactaattgggattccgttggtaccgttgtttatcatggtggcggtggtttaccaatatatgattcacctgttactggtcagcatcaaattgggacagttgaaaatggtcaaaagatcaagttaggtaccgttgttcatgatggtgattcaactccagtcgatgctgatggtaatattggaaaagttattacaactgttggtggccatgattggtatccaattgaaggcggtggctggatagatgctcagtggattcatttcgataaaactggagactatattgttaatcctgcttctggtcacgttactgtagatgcttcaggtactaaaacagcaggaactaaataccctgcttctggtcgtgctgttgttacctattatggtaatggtgataaaatccatgtttactattctccatatcaaggtggcgatcactacagaactggtaagactttaaagaatggtcaaaaattcacttatgattatattgcctgtgatgaaaacggtaatttgtggtatcgaatcggatcccatgaatggatttatggccctcacatttctttaaataaatcaagttcatatgcttcttatccatcacacggtcgaggcgtgatgaagaaaaatcagcaacaatatgtaatgaataagaagaccggtcgaattgagccatctaagaagcaaataaaatgggtttcaactagaactaagcgaacacctaagtacttaaaacgaagaagaaatggaaagacttacaaaatcctcaatccaagatataaggaatacagaaagaaaaaggtcagaacaacagttaagcgtggagtttataatttgaattatggccagattgtccagggtggcgtaacttactacaagacaagtagtggtgtttatgctaagtcttcaagttttgattggaaagctgaccagtctgtaaaaccttatggaccatcaaagattttagctcaaactgcagatatgaaaggtaaggttgaagtttattcggctccaaccaaaggctcagctgttaattgggctttgaaggatggtactggtgttgatgtagtaagtactgctaaaggtgctgatggtaaagagtggtattacgttaagtatgatggtgacaaatatggatacatccctgcaaaacttactaatactaagggagatatcgatgaagaaccacatagtactgaagctgattctgatacagatgatgattcaaatagtactggtcaagatgcacaaaccattaaagtaactttacctgaaaagattttgattgctgataactgtattggcattgaaaatcaacgtgttttgaacttagatttaagttcattctttaagcatgattacaatgatacttcaggcttacaggctgatggtacttggcaaatgactgatgaagatgtatctcaattacgtgaattagctaatgatgctatgattgaacatcaaattggattacctccaacttcaattcaagtaactgcagaacaaatgaaaggtgatttagattttttaaatcaagtttgtttgaatgatcgaattggtgttgaagatgataatgctggtgttcacactacagcagaagttacttcaactgaatgggatgcattgaatcatagatatatttcaataaatattggtgatttacctaaaacctggcagcacttattgaaagagcaaactcagcaagaaataagacaagctactagcaacactaatgaaagaatcaaacatagtgatactttgattggtcgtgcagaatatgccttatctttggaaggtgatgctagaagagcagcacttgtagccatgatgaagggattaaaacttacggataaaaatggcaagccattagtttcaattaaaaaattcaataaatacttgactgaatggtcaggtaaggttttgaatcttcaaaattgggttgatggtacgaaagatgccgttatacgtggtgtagatgctgatggaaaaatcgattgggaaaacgcagtcgatttggtagctaaagatgaaaattctgaaatgcatttcaatgtaaatggcttgtcctatcgcgatccaaaaactcaaaaaataagaactgccatgggtagtgatggttcattttatgcagaacatggtatttttggagatcttatcactcttaaaggaacaatggtacaaatggatgcggctcttagatgtgatactggcggttttgaaataactattggacaaaccaataagtatgaaactggaacattcgactctgaaaaaggattgacggttggtagtaaaaattatgctttgggcttgagctctggccaattaatcatttcatcaaaagaaggaggattacatactggtaattatggaccttcttatttgagattgatgtctcctggagggcatgaactggaattaaatactaatacagcaacttttagatatgatggccaaagatttattactagttctgacttagaaaaagtattaggtgaattgcaaagtatcaaatcgttaatggttactcatgatgaaatgaataagtccatagaggattacctaaagactcaaactaaaggaaagaagtaaataaatgaaaaatgatgataaagtaattgcacattttggaacagaaatggcaaatataattgctgaacaagcgttaacgatttccaagttaaaagttttgctcgagcaagaacaatctaagaatgctgaattaaatattcagattaaagcattgcgaaaggaagataagcatggccgatctgatactaagcacaaataaggcttattcaaatgctgaactgattagagtaaggcaagacgattatggtcaaaccattacggctttgatcactgataaaaccaactcaccaattgatctttcaaaggctgaggtttcatttaacgtgaaagattggtcaggtgacgtaatcagtgataaggctacaggggatgtatccggcaatgctacatacgcaattaataagagtgtggcacttgctacaggttcagcatggtttgaaattaaaaataatgatcaaaaagttgcaactcaatcattttggattcaagtcatggaagcagcagaaaaagttgtacaaatggccgatccatttggtggcgtttcaacaaattaaaagaatcaatgattaatttcgttcccggatttaaaattgaagtgcaacactaagtgttaaacaaaaaggccatgaagacctaaacttgaagtgacgaaaaatcaagaaaggaagatctttatgaccaattcaaattctagcatttctaagcactatcatcaattaaccagcgtacaacgtggacaaattcaagcaatgctggattccggcataacttcccgtactgttatcgctcaagaagttggctgccataagtcgacaatcagtcgcgaaatcaaacgcggaagcgtcctgcaaagagacagcagctatttattgtatgagcactattacgctgatactgcacagatttattatgagaagcgtcgcaaaaactgctatcagcgcaatccattgaagcattatgctgtctttttgagaatgctctccagacgctttaaagctaaatttgatgccaccagcatcgatgagttcgttggtgaattcaaaaggactatgccaggctacccttgtcccagcacaccaaccgtctatcgctatattgatcagggcttgctggacataagcaatattgatctgcctatgaagctcaaaagacgcaggaacaagcgtcatcacagccatggcggtcacgctttgcacaagaagcatcttggcaattccattgaacagcgtcctaaggaggttgaagacagaaaagctccgctgcactgggaaggagatctggttaaaggcgtcagacgcaagaatcagcctgctttaatgactttgactgaaagaaccacacgctttgaagtagttatcaagattcctgactatcgggcaagcacatgccaaaggctgcttcaaaaggagattgacagacatcctgcctggtttaaatcaatcacgtttgacaatggctctgagtttgcggatatgaccaagatcaagggctgccagatttactttgctcacccatattctccatgggaaaggggcaccaatgagaactgcaatggtcttttgcgtcaattcttccctaagggcaagagcatgaaagacaagtcaaaagcttatgttcaacaggcaactgatgccattaaccacaaatatcgccgaatcctccaatatcacacagcagaggaactcttcaagcaatatatctcttcataacctaactgttgcacttaatttgacaattcagggattaatttcgttggctctttttgattagaaaggaaaatttatatggcagttaaagcagatattacgattgatattgataagcaagttggtgaactgcaaaatctaacacagatttataatgcacgtgttggtgataataagacaccactgacaatcgcttggcgtaaaaatgatttgcctttaaatttaaagggattacatgcctacattgttggtaaaactggtgatggttcatataacagtgaaactggaaaaattgattttccaattaatactcctgtttctcaatttgaagatgatggatcaggaactttggatggtggccaaagtggattaactactttgctaattcctaaacaaatgtggcagaacagtggtttatttgctggatatattggcttgaaatcagaagatggttcagtttttacttccaaagatatttggttcaaagttttaggcaacgttctggatgccggtgtagaaataaattacttcattggtgattttgataaagcattagcagaagcagaaaagaagcttcaagataagactgatagttttgatcaaattaccaatgcagccttaagtgatttacgggaaaaatatagagaaatagcacaatcttcagagaatctggcttcagaatataccgcaacattaaataatattaccgactctctaaagagtatgcaggcatatattgaaacacataatattgttactacggataaatttgaaaatctggataagtatttaactaataaagttgctacttcttatgttcaacctcaagcctttaacaatttagatgatttaaagcaaaaatatccaaatggatcaaatggtattatggtaaccactgacaatggccattattatttatggaacaataattcttggaaagactgtggaacatatcaaagtacaggaattgcagataagagtattcatttagaaaatttaagtgatacattagaaaatagtctttatccaaatgttgatgaagttgaaattacaaatctactagatgggtatttttcaaaatatggaactgtaattactcaacataatgcctctgatggtgaccctgttcatacagaaaaaattccagttaaaccgggcgaagaatattatgtttacacaaataattattgggatggaaaagcaattaatatgatggaaaatgatactattattaattatttcccatctgaaaatgatgcacaaattaagtcaataaaaattaccataccgaataacgttgattcgttaattcttaatgggacaaaacaatttgttcctcgtctgtttaaaattaatagttataatcaggatcaagatgctatagataatctagcaattattttaaaagataaggaatttaattttaaagaaattaatttaacacaaattaataaaacaggatattgggactatacaagaaatggaaattatacagatcaggctcctgataataaaaatgcaatgaaatcatatcttcctgttaaggttaagccttttgagatttacagattaacgggttgcagtgcatggaatgctagactttatgaaattatagattttcaaggccatctgatttcttgttgtgataatgaaaatagtcagagtcttactacaactttcatgattccaaagaatgctgcatatcttgaagttaatgaatatttcttaaatgtacaaacaaaacttgaaaaagctgtttcgattaaagaaaagaagcctttggacggcttacattggggagccatcggtgattcttggacagccatttttgataaagatggtaaaagctatgtcaatgatgtagcggacattacaggcattacagctactaacttaggtgctggaggcactggttatgttactggtggcgcgaataattggaacaatcaattctttaagcgaaatattgatgctgacactgatatatgtactatctttggtagctttaacgatgcttattatcctgattttaaatttggacaaaaaggtgatactgatacagctactatgtggggcgctatgcttgcaacaattaataattgttataagaataatcctgatgttctaattggtattatttcaccaggtccatggggagcaattaatccatttaagacagatacaatgtcaaagctaaactcacatagtgatactacagttaacaatatggcaattaatgatttcgcagaaaaatatgtacagactatgaaagaatttgcccaaatgtactcactaccttttctagacttgtaccatcaatctaacttacggccatggaatgatgacttcatcaacaaatattatcatggtcaaagcgctacagatactacgcatcctaatccaaatggactaaaaaaatatatagcgccacgaattgcaagttttcttgaaaagattatcaaatgattggaaggtgagccttatgatcaagcgttggcgtaaattgagtgcgctagaaatgtttgttaatctaggacagctaggcatttcactttgggtgattgctatcggctgttttttaattggggacaaacattactttttctggccaccaacttttagaaatattgaaaatgatacaagaattgacatgctaattatccttgttggattagcactttttttatgcactatttttctagttgaaaataaatatgtcattgtaactctatttactttagttggtgcaatttcattagcacttgctgcactatcaggattacatgcttattttgcaggacattgggaaatgggtatggatgtggcacatgaattagcactgtttggagcaactttactggtcggccactttaagtgaggtgattcgcttgcaagatctaagtaacttgatagcaagtattgcagctttaatgggggcagttagtgctttctatcaggtaatcatgaaaaacaagcgaaatcctccaagtgatgaaaaggaactggatgaagctaagaaagaaattgaagatttaaaaagtgaattgaaggggaaaaataaagatgaaaactgaaatcgtaattaatttaatttgggctgttgtacttgttttagcaatgtttattggagcatggtataagaataatcaagctaaagttgaaaagatcagacttactcatcctgaaatggggcatgtccttgatattgttgggatgcttgctctaaaggcttccaattatcaggaaactcaagatgataaaaacggtgatcaaaagttagatgatgcaactgattcagcatacaatcaaattaaagctttatatccagctatttctattagtaaagatacagttcgtaatatggtgcaatttgcgtatgatacaattgtggccaaaacaaatactgatctaaaacaagaacaaaataatatggccaaagttaagaattcagataatgccgagcaaaagaaggatgatattgtaaatgattagtaagaaaagttatggagtagatgttgctaaatatcaacctgagtcattaagagtatacgctaaagctggtgctaagtatgccattgtccaggtaagcgtatctaactcaattgttgctcctagagcaaaggcacagattacaagtgcaaaagctaacaatatcatgccaatgggttatttttatggctgctttggtcatagtgctactcaagccgcgtcagaagctcactttgcaattaagaatgcaaaaagtattggattgcctaaaggctcatatcttggtgtagactgggagagaaccgataataatgtgaacggcaatgttagtcaaaacactgctgctattattcaagcaatgaaagttattcgtgatgctggttatattcctctcttatattcaggggcagatttgctaagaaataaaattaataccaagcaaattattaaacagtttgggacttgcctttgggttgcttcatatcccgtttccagtcgtgtgaatactgctaattttaactacttcccatcaatggatggtgtagcgatttggcaatttaccgataattggcatggtcttagcgttgatggtgatattaacgttattgacttaaaaggtaccacaaaaaagtatgcttcaaaatctaagtgggttaaaaaatctggcacttttattttaggtgaagctttaaagattcatacttcacctcatattaattcacctgctattgctaagttgcaaaaaggtagtgtgattaaatatgatgcaactttacaaggaccactgcgtctttggttacgacaacctcgtaacaatggaaaatatggctatgttgttggtaaagataagtatggaaaaaagttaggtaaattcaagtaaatcatagctgctgagagcgtgattctatgacgctcaaattttgatttgattaaattattaaacttggcaaaagaaaacattagcaacttactataaagaaagatccgctctaggggtaaaactctagagtggatctttttttgcgttttattttaaaaattatgaaaaatcattataatctattttataattcggtttaagattgaaaaccgaaaaaaccgaaaaaaaaccgaaaacttcacggaatttggaggattttgaaagaatgacagagaataataaacaagccaaaaccactgataccaagggaaaagccaactgcgacacagcaatcttcgctggcggttgtttttggtgcatggtcgaacctttcgatacagttgacggagtagaaaaagtagtttctggttatactggtggtcatgttgctaatccaacatatgagcaagtctgttcaggtacgactggccatactgaagctgttgagattacctttgatccagcaaaaatatcgtatgatcaattgctaaactattattggcaagtgactgatcccacagatgcaatggggcaattccaagatcgtggtgataattatcgacctgtaattttttataattcacctgctccaaaagaagcagctgaaaaatctaagcaaagattacaagctagtggtaaatttgataaaccaatcgtaactaaaattgaaccagctaagccattttatccagctgaggaatatcaccaagatttttataaaaaagatccacttagatatgcaatggaagaagctggtggaagagctaagtttatcaaggaacattgggattaataaaaagcagatcataactgttataagctgtgacctgcttttttactttcaatattttagattatgttaactatttctttaagttgcttttgataacctcgattggattgagccaagttccgttgttaacgttccaattcttacatggaaaaccatatttgtttatgtaatctttatttgtttgagtaacgccaaggtgtaagtgtgagccagttagcttaccgatcttttgacctaatttaatcttttgaccagtcttaacataaatgtcttttttcttattaaacccttcttggtaaacttcaacgtaattatcaggactaataacccagatgaaccagccaaggccgttgccataagcaacctttttaacagtaccttgatgaattgcatatacgttagaatgcccaacttctgaaaaaccaaaatcccaaccatcatgaaagtaggaaggtggtgtagtagaacgcatatagttagttatgccaaaagtttgtgcattatacattggacgaacaccatttttcttgttggctttaaacggataagcccacttgaggttcttgggttgaacttcagttgtattttgtgagtcatcaagcgtatcagcagaagcagtggtggttgataaaccaacgcttgaagttaataatgcagtacctaacaaagaaattattaatttacgaaatttcattataaaaagaaaccagataagttctgatttttatctcctctcttaattcacctaaactattgtagctcagcagttttacgagaaagttacaattaaatttcgattaataacaaaaagttagtatgagtatatgtgaatatgtttttaattacgagtctaggtatttttgaaatttctttactttattttgggatttacatagaattaaattaataacgtttacattgaatttagtaaatgatagtagacattaatttggctcaaaaataataatttggacaatgaaagtgaaactgtcaaatcttttgtgtaaatagatctttctcgtaaattgattttttaattatttatttaatcaaagtaggattctaaggtgtcctgaacctgaccaaagcctttatgaattcgattgaaataacggtcattgtagctcattgcctgaatgccaataaaagcatcaagcgactgttcagttggaaactctgccttaggcttagctttgcgcttgatcacattgttaaatgattcaatcatgttagtcgaataaattgaagctctgatctgcttgggatagttataaaagaccagcagatctggttctatgtctttcaagcttctgataacatggctgtaaaccttgccccatttggtatagaagtcatgcaggacagctgtggcttcttctttgtttgtctgttgatgcacctgtttgaattcgttcatgatcttttcacgatcgtcgacgcgtactttagcgcagatattgcgcatgacatgaaccaaacagcgttgaaaatgagctttaggataagtcctggccaaggctgttttcatgccaacaacaccatcagaaagaaaaagctcaacttgctttaagcctcgggatttcatgttttgaagcatatctgtccagacttcaatgttctcgctaggcgcaatgcagtagtcaatgacctccttgtgcccattaggcttgatgccaatggcaatatagactgcttcacgctcaaatgtttctcggcgcaaaggaaggtatgccgcatccaaatagacgcagaaaaacttgtcgcttagcttgcgtttgtggtaagcctcaacctttggaatcatctgcttggaaatatttgatacctgagctggactgtaatggctgccatacatcttttcaattagatcggctatttccctggtggtcacgcccttggagtaaagcttgataatcatgctttccaagatatccgagtgctgcttgtagccaggcagcgtgtgctgatgaaattgaccgttgcgatcccgaggcacttgcacttcaattgggccaaattgcgtatcaactttgcggaaataagcaccatttctagagttgccagtattccagccatttctggcatagggatcatagcccagaaaggcagtcaattcagcttctaacaagttattaacagcctgttgtagctctttgcgcaataaatcatttattttgtctggattgaatagagcttgagcaaaatctttggtaaaatcattcatgaaggagttcttctttctgtatgtgtttttttgttcaaaccaatcatacgagaaaggaactcctttttctaatgtttaaagaaataaatttaaggaatcattcatccttacacaaactattttacagtctcgaagatgttcttccagcaaatagtcttttatatcaaaaatatactgttttggatgaattaaataaaatcccggatttaaaattgaagtgcaacactaagtgttaaacaaaaaggccatgaagacctaaacttgaagtgacgaaaaatcaagaaaggaagatctttatgaccaattcaaattctagcatttctaagcactatcatcaattaaccagcgtacaacgtggacaaattcaagcaatgctggattccggcataacttcccgtactgttatcgctcaagaagtcggctgccataagtcgacaatcagtcgcgaaatcaaacgcggaagtgtcctgcaaagagacagcagctatttattgtatgagcactattacgctgatactgcacagatttattatgagaagcgtcgcaaaaactgctatcagcgcaatccattgaagcattatgctgtctttttggggacgctttaaagctaaatttgatgccaccagcatcgatgagttcgttggtgaattcaaaaggactatgccaggctacccttgtcccagcacaccaaccgtctatcgctatattgatcagggcttgctggacataagcaatattgatctgcctatgaagctcaaaagacgcaggaacaagcgtcatcacagccatggcggtcacgctttgcacaagaagcatcttggcaattccattgaacagcgtcctaaagagattgaagacagaaaagctccgctgcactgggaaggagatctggttaaaggcgtcagacgcaagaatcagcctgctttaatgacttcgactgaaagaaccacacgctttgaagtagttatcaagattcctgactatcgggcaagcacatgccaaaggctgcttcaaaaggagattgacagacatcctgcctggtttaaatcaatcacgtttgacaatggctctgagtttgcggatatgaccaagatcaagggctgccagatttactttgctcacccatattctccatgggaaaggggcaccaatgagaactgcaatggtcttttgcgtcaattcttccctaagggcaagagcatgaaagacaagtcaaaagcttatgttcaacaggcaactgatgccattaaccacaaatatcgccgaatcctccaatatcacacagcagaggaactcttcaagcaatatatctcttcataacctaactgttgcacttaatttgacaattcagggaattaaataaaattagtgtgaatgggaagaaattatctgttagcgtaaagcaagaactttatgaggacttattcaaaaagaataatactgtctcagctaagcagcttaaaaattggttaatagaaaatcagaaattgccttatatcaaaattaaggggttagctgatcaaactaaatttaattctagtttatctacatacattaaattaaaaaagtcaggtttatttgttgataaacttgactcaaatgaatttcgtgatgattttgaaaaaattattgaatggtcaactatttttgaagataagcagatttatatacaaaagcttcaaacaattgattggcttacagcaaaacaaattcaattcctacaaaatattagacttcagggttggggcagattatctaaaaaattgttaactgctattgtagattcaaatggtcaaaatattattgagcagttgtggaatagccaacaaattttcatgagtatagtaaataaagcagatataaaaggcacaattacagatgcaaatcaagatctcatgcattcaaatagtatggaagatattttatcagaagcgtatacttctcctgcaaataagaaaatgattaggcaggttgtaaaagttgttcatgacattcaaaaagctgcttctggtcaagcacctaaacaaatagctattgaatttgcacgtgaaagtagaagaaattctaagttatcacaaacacgagggcataagctacaggatatttaccaaaaaatatcaggagatatagtaaataaaaatttgaaggataagctggctgaatatatcaagaataatcaattaaataaagataaatattatacgcgtggtgctagttaaatcgttttagttaataaaaaagtccaatcttgttagactcgacttgtaaatagtaataatagaaaagagtctgatctgattgaactgccttaagcttaagcgttttagccaccatttacaagttagttttaaagatttagtgataatttgtcggcactggtatcgtttgtatgcaccggctgagtttactcatcggcgaaatattgatcaaattaaaactacggacagtctgattttggctttacttatctggcaagctaagacaggaattgaatcacaaagaagattctgtgaatgtttcaattgtttatcacactcacgttttaatcggcgttcacgtcagctattgcaattgatttatcagatacggcaagaaatgaataaaaaggttgacctgaatggacagttcttgatcattgacagctttccggtacctgtttgccaaccaattcgaaactatcgtgctaaaatttttcgcggttatgccaacattggttataaggccaccaagaaaatttacttctatggtttcaaagttcatgccattgttagcgatgacggttacattcttgattatgtcgtaacaaaggcatcagttcatgatgccagggagacagttgaactgatagaaaatacccatccatctaattactatcttcttggcgacgaaggctatttaggcaaagaactgcatcaacagctaaaacaaatgggttacgaactttggacaccatatcgtaaaaatatgacaggagctaaaaagcacaatgatcatcaattgatggctattcgcagaacaattgaaagcgacttttcgcttctgacctattacaatgccgagaacaatcgagcacgtagtctgataggctttcaaagccggttggaaattgcaattttagcttataatttggcttattgtctagaacgatttaactagcaccacgcgtaaatattatctttatttcatgcaacttggaagagatgcttatactggtaagccaattaatattgatgaagtatctcagtattatgacatagacaatatcttgcctcaaagttttattaaagatgattccctgaataatcgtgtgttggttgctaaaccaataaacaatggtaagtcagatggagttcctttaaaactctttggtgataatctagctactggtttagggataacggttaagcagatgtggaataactgggctgataaaggactgattaataaagcaaaacaaaataatttattcctagatccagagaatattaataaacatcaagcttcaggttttattcgtaaacaattagttgagacaagtcaaatcataaaattagcaactacaattcttcaagctgagtatccaaagactaaaataatagttgtcaaggctagttctaatcactatttacgtaatgagtttgatttgtataaaagtcgagaggttaatgattatcaccatgcaattgatgcatatttaactactatttgtgggaatctactgtatcaagcgtatcctaaattacggccattctttgtttatggtcaatttaaaaagtttagttctgatcctaaaaaagaaaatgaaattttaaaaaagaccaaaaattttgactttgttgccaaacttttgggtagtaaagcaccaaatgagatcagatctcaacaggggaaagttttatttgaaaagaataaaattcgattgcaacttaataaggcatataattacaaatatatgcttgtatctagagatacgacaacaaagaatcaagagatgtttggaatgactatatatcctcgggctgaacgggatatagcgaagagtcgtaaattaattgaaaaacgtaaaggattttcaacagatatttatggtggctatactggtactgcagcagcctatatggcaattgtaagaattaataagactaaatcttcacagtacaaagtaattgctgtacctatgacgaagcgtgctattttaaataaagctgaaaaagaaggtaactatgaaaagattctaaagcaaattttatcaccaagtattttatacaacgataagggaaaacgaaaagcaggagtaatatcatttgatattattaaaggtaaagttccatataaccaggttgtgcaagatggcaataaaaaatttttgttaaagagtgctatttatttatgtaatgcaaaacagttggttttatcagaagaggcaatgagagtaattactggtcattggctagattctgataagcaagatcaagaacttttggatgtttacgatgaaattttagaaaagattgatagatatttacctttgtttgacattagagattttagaaataaattacataagggtagagaaaaattcttgaaattaaacgctgaggataagtttaaagctattattcaaattgtgaagggtttgcatgataattctgatacaggtgaacttaaagatattggtataactgtaccatttggtcaacttcaaaataattctggaattacattatcttcggacactattttagtttatcaatcacctactggtttgtttgaaaaacgcgttaagatttctagtttataaaaataaatgaggaaccgacatgtggttcctcatttttacataaaaaaagtccctcgatagctcgggacaagtgttgaaactctgcgtactaaaacgcattgcttgattttaaattatgattgttagatcaataaggttaagagttgggagctacccaacaaataaataatatcattatagatatagatgtacaaggagaaaaaatgggatggcgtaacgtaataataactcagcatgcaaagctaacatactctatgaatatgcttatagtccaaacaaaagatggtattaatcaaatacctattgaagatatcaatttggttttaatttcaacatcacaggctgtgattactagtgctttgataagtaagttagccaaaaatcaatgcaaggtaatctttgttgatgataaatatcaacctgttacagagacagtgaattattatcctggggctagggacataaagaagttgaaaatgcaatttgaatggaatgaaagaagaaaagaaaatttatggaccaaaattgtagctgctaagctaaaaaatcaaatatcggtgttaaaaaattatcgaattgatgaaactgaagttgagcaagagctgtacaagttagaggtgaacgatttatccaatagagaagcagcggctgctagaaaatatttcatgaagttatttggtaaggactttattagaagaaattccggagtgattaatgcagcactagattatggatactcaatattgctttcatccttcgatagagaaattgcaatgaatggatatttgacttatctgggaatacatcatcattcagtggaaaatcaatttaatttagcttgtgatttaatggaaccatttagatccatagttgattattgggttaaggcacacgaaaatattaccagttttacaccagatattaagtatggattagttgagttgcttagcttacaaataaaattcaatggtaggaatacaattttaacgaatgcaatttctgtatatgtaagaagctgccttagatatttaagtggagaaacagatgatattagaatagagatgagtttgtgtaatgaggtaccgaatgatgcgattaatgataatgtttgatttgcctacggacactgccgctgaaagaaaagaatatcgacaatttagaaaagctctaataaatgaaggatttttaatgattcagttttcggtgtatgaaagagtatgtgtcactagacaaacagctaattttttagaaaagagaataagaaaatttatgcctagcaaaggtgttgtgcaaagtctaatggttacggaaaaacagtacagtgatatgcatttcttggttggggatgcagtaaaagatattcgcaatacttcagacaggacagtgatactatgattgtttcctatttgtcacataagaaaatctgtttaaaagatggaattaatgttatttgcactcaaagtcccattgcctataaagatctggttttaggttttcaagccttaaatgatctaatagtatgttctgatgacgaatacaacaataagtctattagtaagagttttgattttgtaggagccccgttgttaaatgacaatattatggcaaagtatatgaatgtcattattaagaactttatttctaacttggatgaggtaaacagaaatagaattttaaaatctttttattcattagaaacagtattgaatgattctttgcttttggaagatttacctttagaaattgattttagcgaagatattaaaaagctgttgaaaatggttaacattcatttagatgctcaattaatgttaacgagactgtaaaatagtttgtgtaaggatgaataattccttaaatttatttctttaaacattagaaaaaggagttcctttctcgtatgattggtttgaacaaaaaaacacatacagaaagaagaactccttcatgaatgattttaccaaaaatatagcacaagctctattcaatccagacaaaataaacgatttattgcgcaaagagctacaacaggctgttaataacttgctagaagctgaattgactgcctttctgggctatgatccctatgccagaaatggctggaatactggcaattctagaaatggtgcttatttccgcaaggttgatacccagtttggaccaattgaagtgcaagtgcctcgagatcgcaacggccagtttcatcagcacacgctgcctgactacaagcagcactctgatgttttggaaagcacgattatcaagctctactccaaaggcgtaactaccagagaaatcgctgacttgattgagaaaatgtatggcagtcattatagtccagcccaagtatcaaatatttccaagcagatgctccccaaggttgaggcttatcacaagcgcaagctaagcgacaagtttttctgtgtctatttggatgcgacataccttcctttgcgccgagaaacgtttgagcgtgaagcagtctatattgccattggcattaaacctaatggacataaagaagtcattgactactgcattgcgcctagtgagaacattgaagtctggacagagatgcttcaaaacatgaagtccagaggcttgaagcaagttgagctctttctttctgatggtgttgttggcatgaaagcggccttgaccaggacttatcctaaagctcattttcaacgctgcttggttcatgtcatgcgcaatatctgtgctaaagtccgggtggatgaccgcgaaaagatcatgaacgaattcaaacaggtgcatcaacagacaaacaaagaagaagccacagctgtcctgcatgacttctataccaaatggggcaaggtttacagccatgttatcagaagcttgaaagacatagaaccagatctgctggtcttttataactatcccaagcagatcagagcttcaatttattcgactaacatgattgaatcatttaacaatgtgatcaagcgcaaagctaagcctaaggcagagtttccaactgaacagtcgcttgatgcttttattggcattcaggcaatgagctacaatgaccgttatttcaatcgaattcataaaggctttggtcaggttcaggacaccttagaatcctactttgattaaataaataattaaaaaatcaatttacgagaaagatctatttacacaaaagatttgacagtttcatgttaacaccatatgctataattgaaacagttcttaagattcatcaagaatataatcttgatagtattcccgtgttttgtaatgtagctcattaccttgatgaaacacagttaaaagaacttagtaagattgttagacaacttaaattgaaaattattttaattgaattcacagataagaaatatggggtagcagtcaaggatgctcaagttgcatatattgatcgagatcttgttgattggtattagacaattgattaaaaagatattatgaaatatcggttttagatgattgttagatcaatgaggtttagatctagaagatggtacaaataaaccattttctagttttagatgattgttagatcaatgaggtttagatcaaatgcttttcacgatggaccggatttatagttttagatgattgttagatcaatgaggtttagatcaatgggcgacttcttttattgttgggaaacgttttagatgattgttagatcaatgaggtttagatcccactatcgcgcctggaatacctgttttctgttttagatgattgttagatcatgggagtcagaacagtaatatgcataaatttacaaatatttttctgtaaataaaaatcgctctagagaaactctagaacgatttttggacatacttgatcttagtatctattattacttagcgtaatcatcaatacccaagtgctccaaaataagtgcggcagtttcttcaatggagcggtgagcaacattaattacatagcaacctaatttcttataaagtgcttgtgctgattcaagctccttgttgattgaatccatattagaataagtagtatcaggattcaaaccataagcgatcattctttgacgtctgatttcgttcaatacagatggatcgttagtcaagccaataatcttcttaggatcaatttcgtagatttcttttggaatgtgagtttcaggaacaagtggtaaattagctacctttaagttcttattggctaagaacaaagaaagtggagtcttagaagttcttgataccccaagtaaaacaacgtcagcttccaagaaaccttttggatctttaccatcatcatacattacagcgaattccattgcggaaattctgtcaaagtacttttgatttaagctatgctgtgcaccaattttttgatctggtgtcatatgagtagtttgttgaattgcttcaactacaggtgagaagatgtcaacacattcaacattatgctcacgggcaaatttgataactggcatttgcatttcatctttaaccaaactgtagataattaccaagtttggatatttttcaatttctgttaaaacttcgtccaacttcttttggttagtgataaaggggtaacgacgatagttgatattgcagttaggaaattctgcagctgcagctgtggcgttactaaaagcagtgtcaccagccgcatcagaaataataataatgtttaattcattttggtcttttgtttctaccatattaagctcctcgtgtattattaaatatctttctgaaaataattatactattaatgaaagcggattaacaataaaaactcagctcttttattaaggtaaagtagtcggtttacttaacttaaaaatttatcaaaaagtttttgaattgtattgaccctaaagattagtttggtataatttaagtaaatgtatggcgtaacgccaagaaatggaaggagggatcacacatggctaagacaatcgttcacgaaaacgagtctattgatgatgctcttcgtcgtttcaagcgttccgtttcaagaagtggtaccttacaagaataccgcaagcgcgaattctacgaaaaacctagtgttcgtagaaagttgaagtctgaagctgcacgtaagcgtagacattattaataaactactgagaaagctacctgtttttgggtagcttttctttttgacttcttgaagcataattttgattatgttaagtaaatatttgttagttttattttagttaagaacatagtttgttataatactattgggtttttaatagaaagaaggatattaaatgagtttgtcagatcaaatcatggctgatatgaaatcagctatgaagaatcacgacaagacaactcttaatactgtccggatgatcaaatcggccttaatgaatgaaaaaattaaagcaggacacgatttaactccagatgaagaattaactgttcttaatcgtgaaaagaagcaaagagaagaatcgattgacgaatttattaaggctaatcgtgatgatttagctgaagaaaccaaaaaagaattagcagttgtagaaaagtacatgcctaagcaaatgaatcaggatgaacttagagcagctgttaaggaaacaattgatgaagttggtgctaaaggtaagtccgactttggtaaggtaatgaaagctttaatgccaaagattaagggacgtgccgatggcaaggctgcttcgcaatcagttcgtgatcagctaaattagtagtaacaagaaggagcgggtctatttggctcaaacaacttttacacctcaaagaccagaaaatattcaaaaactagttggagttaatgacggaaatttaaagcttctttctgaaggttatgatatttctgtgtcagatgtcggtaatgagattgtcattgcaggagacgatgaagagaagatcaagaaggtagttgctgttctaaaggcactcgatagtgttgtgaatactggtgttaacatcggtgcgcccgacacagtaagtgcgatgaagatggctgacaagggtaccacagagtactttgcagacctatataaaaaggttttgattagggatgctaaaggtagacctatcagagtcaagaatatgggacaaaagcgttatgtcgaagctattgataaatctgatgttgtctttggaataggaccagctggaacggggaaaacattcttagccgtagtttgtgcaattgccgcctttaagaagggagaagtttctcgaatcattttgactaggccagctgttgaagctggtgaatcacttggatttttacctggtgacttgaaagaaaaagtggatccatatttgagaccaatttatgactccttgtatgctattcttgggactaatacgactgaccgtttgatggaacgaggcgtaattgaagttgctccacttgcttatatgcgtggacgaactttagatgacgcttttgtaattcttgatgaagcccagaacactacagatgcccagatgaagatgtttttaactagacttggatttaattctaagatggtcgtaaacggtgatatgacacaggtcgatttacctggtcgacagcatagcgggttaattgatgctagacatatcttgaagaatatcgaccaaattaaatttatcaacttttctgctaatgatgttgttcgtcaccctgtagttgcgaaaattattactgcttatgaaaaagaggacattaaacactaaaaatggatccaattgatattacttataatgatgaagttggctttttagatgatgaaaagcgtaactggcaagactggattatgaaacttttgctgctagctaagaaggaaattggcaaagataacaacttagagatgagtattaactttgttgacgaagatcgtagtcatgaaattaatttaaagtatcgtgacaaagaccgtcctactgatgtaatttcctttgcaattgaagatggtgaggattcaattgatcttgcagcatttgcagatgatccagactttcaagaggatatcggtgatctatttatgtgtcctagtgtgattaagcgtcacagtaaagagtatggtacaggttttgatcgagaatttggatatacaatagtccatggctttttacatttaaacggctacgaccacattaagccggatgaggccaaagaaatgtttggtattcaaggaaaagtgttagaagattatggtttgccattgtatcctgatcaattagatgaaggcagaggtaaataatggaagaaaaagagtttaagtctggctttgttgctttagttggtcgtcccaatgttggaaaatcaactttaatgaactatttagttggtcaaaaagttgccattacgtctaataaaccacaaacgactcgtaatcgcatttcgggtatttatacttcagatgaaatgcaagttgtttttgtagatacgccaggtatttttaagcctcattcaaaacttgacgactatatggataaggctagtgtatctagtttgaatgacgttgatttagttttattcatggttgaacctgaggaaatgggtaagggcgatcaatacattgccaacttgttaaaagaagtaaaagttcctgttcttttagtaattaataaagttgatgaaattcatcctaataagcttttgccaattatggattcatatcacaaacttgagggctttaaagaaatactaccgatttctgctactcaaggaattgggattgaagatctgcttaaaacgattaaggaatatttgccagtaggcccacaatattatggtgctgatcagatcacagatcggcctgaatattttgtggtagccgagttaattcgtgaacaaattctgcgactgacttcacaagaagtaccacatgctactgctgtcgcagttgatcatatgaatactcatcaaaatggcaagctcttgattgaagcgactatctatgttgagaaagacggtcaaaaaggcattattattggtaagggcggtaagatgctcaagcagattgggattaattcacgtcaagagattgaaagattgcttggtgaaaaggtcaacttgcgtctctgggttaaggtccaacataactggcgttctgaccctaactttttaaagcgaataggctatgacaaaaaagaactttagttgaattactgttgtataagcgttgtcgaaagatgacgtcttttttgtatgtttagggagacaagaaaattctattcgttggataactaatgggataaaaatagatacaatagtaatgacaaagtgatgaaattttgggatctattgttttgtgattgttgttatattgggatttgtttactgtattctccacgtatgtggaggctgaaacccagtttcgaagttgattctgggtaaagtcttggtattctccacgtatgtggaggctgaaacagcagtctttttgtactatagactatttatgatattatgatatcttcatcagaatatctataaaaaatgaattttaaatactaaaggagtcatgatatggcacgtgaactaaaagaagttcagggtattatctttaaaaggcagaaatataaagaagcagatttattagccaaaattatgactaaacaagatgggattatgactctgattgttaaaggagccctgaggcctaaatcaagattaagtgcagcaacattaaatttttctattggtacttacgtaatttatacgagcgaaaagggcttaagtaatttacgcacatataaaggggcaaggcagtttgatggcttatataatgatttaaccaagaacgcttatatttcttttatttttgatttaattgatcacgcctttgtagaatatcagccaattggtaaatattatgatttagctttatttgctttgaaaaaaatagatagtggcgttgatgcagaaatgattacacaaattgtgcagatgaaaatattagcagcatatggtgttgagccacagctaaagcattgtgttatttgtggtaaggaaaaaggcgtttttgattattcgattaaaatgggtggagttatttgtagcgatcattttagtacagttactagccgaatgcatttaaagccaaaagaaactgctgtaattagaacaattggcttattaccgattgagcgattaggcgatattaaaattaatgaagaaacgaagagggctactagaaaagcgattgatcgtatttaccatgaaacgataggcctaaatttaaagactaagaaatttttagatgaattaaaactttttagttagtaaaaatctggttttaccatgacccatgtgttaaaataaaaacgtatttgacgatgatgaggatttaagaaaagtactagttcagcgaatgtcggtcggtgtgaggacatctaggaaaaggcacctctagtcatattgttcaattaagagcaggaaggatacttcctgaattagggtggaaccgcgataatatttcgtccctatgcaaaattttgcataggctttttttatggcctagcgcaggaggagattaaaggaaatggcagataagaaattaaatattcagaatatgatctttaagctggaacaattctggtcctccaaaggttgtatgattatgccttcatacgatgttgaaaagggtgcgggtacaatgagtccttacacttttcttcgtgcagttggtccagaaccatgggcagcttgttatgtagagccttctagaagacctgcagatggtcgttatggtgaaaaccctaatcggttattccaacaccaccaattccaagttgttattaagccagctcctaaggatattcaacaatattacctagacagtttgaaagttttaggtatcgatcctttggaacacgatattcgtttcgttgaagataactgggctaacccatctatgggttgtgctggtgttggttgggaagtatggcttgacggtatggaagttagccaattcacatacttccaagttgttggtgaattagatgttaagccaactatgagtgaaatcacttacggtgttgaacgccttgcgtcatatattcaggatgttaactcagtatttgatcttgaatggggtaatggcattctttatcgtgatatcttcaagcaaccagaatatgaacattctaaatatgcatttgaagaatcaaatcaagaacaattgcttcaattctttgatatttatgaagcaactgctaagcgtttattggataagaacttggttcacccagcatatgattacattttgaagtgttcacatacttttaacttgcttgatgctcgtggtgctgtttcagttactgaacgtgctggttatttatcaagaattagaaatcttgcgcatgaagttgctgtcaaatttgtcgaagaacgtgaaaaacgtggcttcccattgcttaaaagtgcagaagacaaaaaggcgggggtagaaaatggctaaagattatttatttgaaattggtactgaagaaatgccagctcacgttgtaccacgcagcgttaagcaattagctgacagaacaagaaaatttttaaaagaaaatggcttgaaatttaaagatattaagactttttcaactccacgtcgtttgactattttggttgaagatttggctgaaaagcaagacgatattgatgaagttaaaaaaggtccagctaagaagattgctcaagatcaagatggtaattggactaaggctgctcaaggatttgctcgtggccaaggaatgactacagacgatatctattttgaagaacttaagggtactgaatacgcttatgttcacgttcaaaaggaaggtaagaaagctagtgatatcttacttggtatgagcgatatcattaaggcgatgactttccctactaagatgcgttgggattcaaatgattttgagtttgttcgtccaattcactggcttgtttcattatttggcagtgatgtaattcccgttaagattttggatattactgcaggtcgtaaaactcaaggccatcgtttcttaggcgattcagttgttttggccaatgctgatgactatgaagatgcattaaaagatcaatttgtaattgctgatgcagatgaacgtaaagatatgatcgttcgtcaaatgaatgaattagttaagaagaacaactggcaagttaaaccagatcgtgatttactagaagaagttacttatttagtagaatatccgactgtatttgctggttcatttgatgaaaagtatttgaagattcctgatgaagtgctgattacttcaatgaaagacaatcaaagatactttgaagtctatgatgaaactggtaagttaattaatcactttattgctgttcgtaacggaaataaagattaccttgataatgttatttcaggtaatgaaaaagttttagttgctcgtttggacgatgctcaattcttctatgatgaagaccgcaagtatccacttagtcattttgttgatcgtcttaagaatgtttcattccacgataagattggttcaatggctgaaaagatgcaacgtgttcgcatgattggtgattacttagctaagcgttgggatttaccagagaatgtagtcaaggatttcgaccgtgctagtgaactttacaagtttgacttagttacccaaatggttggtgagtttgcagaacttcaaggtgtaatgggcatgcattatgctcgtcttgcaggtgaggacgaagaagtttcagttgcaatcaaggaacactacatgcctgccactgctgaaggtccacttcctgaaactacggttggttcattattatcaattgctgataaaattgatacaattgtaaccttctttggtgcaggaatgattcctacatcatctaatgacccatacgcacttcgtcgttatgcatatggtattgtaagaatcttacttaatgagaagtggtcattaccatttaacgaagttttaccagaaatcattagtatgcttaatggtgtaactccagctaagctacctaagagtgatgctgaccaggaaattgcagacttcattcgtgatcgtgtcaagcaatacttacaaaagaatgacttcaagtatgatattattgatgctgttcttgcttcaagtcaacaagatccaagtcaaattttagcagcagctactgtattgcaacttcaccatgatgatgaagaattcaagccagtagttgagagtttgactagaattgataacatcttaaagaaggctaaatttaagagtaatactgctgttgatgaaagtctctttgatgataacagtgaaaaagaactttacgctggcgttcaaaacttgcaagatattgaaagtttggctgatctctaccaaggttttgttcaactgcaaccagtgattgatcaatactttgaaactaatatgatcatggctaaggacgaaaaggtcaagaataaccgattagcacaattatatgcagttaatgaattagcagatcgtttaggtgacttaagcaagttagttattaagtagttaatttagatagaaaaagggtgattcatatggctggacggattcctgaagattttatttcagaggttcgcagtaacgtcaatattgttgatgttatcagtcagtacgtttcgcttgagaaaaaaggcaaagactatattggtctttgcccttttcatcaagaaaaaactccgtcgtttactgtaaatgctgataagcagttttttaagtgctttggttgtggtaagggtggaaatgtttttaaattcttgatgtataaggatgatttaacttttcccgaaagcgtcgagcgagtagctgagtttgcccatattgctatgcctaatggatatggtcataatagtggcaccaaattaaatccacttatgcaaatgcatcaggatgccgttgatttttatcatcgtgtgcttttgactactaaagccggtgaacgggggatgcagtatgctcaaaagcgagaactagatcaagaaatattagaccattttaagataggctatgcacctaaggctgataatgttttgattacttatttacgtagtaaaggttatcaagatgatgatctagcacaaagtggtttatttgttcaagctagggatgggcagttatacgaccgttttcgtgaccgtttgatgtttccattggataatgaaaatgggagaacgataggcttttctggtagacgaatttctgatgataagaccgaagctaagtatatgaatagtcctgaaacggggatttttaccaagtcaaaggtattattccactttgcagaagcaaagaaagcagctcgtggtgaaggtcacttagttctatatgaaggttatatggatgtaattgcagcatataaagcaggggtgaaatcgggaattgcctcaatgggaactagtttaacagatgaccaaatatatttgttgagacgtattactcctaatatcattattaattatgatggagatgatccaggagtccatgccgaagaacgtgctgcacgtatgtttaataaagatggcaattttaatttaggaattgtagttttaccagaaaaactagatcctgatgaatacgtcaaaaaatatggcgctgagaagtatctggaagaagtcaaaggtgccttaacgccgactgactttttcttaaaacggttggaacaaaaatataacttagataatgaccgtgaaaagattgcttatttaggtgaggccgtaaaagaaattgcacaagtgcgcaatccagttgagcaagatatgtatactgaaaaattggcgaagtctagtggggtttctattgcttcgttaaaggcaaatcttgctaaagaaagacggcgaaataatcgggcacgcaatcatgtacgtaattctcaaagaaattcacctgattatccgatagacgtacctttacctggtgatgaagacgtgcctacagagcagtcagtagttgaaaaaaatcctagtcagaccagactcttgtatttatttattcattcaactgatgctcaaaaatatatgttagaagggcaatttcattttcctaatcaggattttgaaactctggcacaggattggttaaaatatgcggaaactcatgaaaatccacaaattgatgggttcttagattttattcctgagcaacttcaaggtataatagtagatgctgaaatggcacagatgccaaaagattctacaattcaagaagttgatgctttggttctagcattaaaaagacgcaacatctattccaggctgaatgagcttcaagctcaattacaggatgctaagcgcaaaaatgatgcacaaggaattattgcaatcactcaggagattattggattaaaacggatcttaggttaataaggaggctttttagtggcagaaaaagaaactacacaaaaactatctttggataagatggttaagcaagtcgtaaaagacgtaaagaaagataagtcgatcactgaagaagatttcactgctcgtttgattaagccttataacttacaaggcaaggctgtagatcaactagtacaagagtttgaagataatggtattagcattgttgatgaaaacggtgatccttcaaagttagccttaaagaaacaaaaggatgttgaaaaggctgaattaaaggatatgtctgctccatcaagcgtacgcatgaacgatccagtgcggatgtatttgaaggaaattggtcgtgtaccacttcttactgctgatcaagaaattgctcttgccaaaagaattgaatccggggatgaagaggcaaagcaagaattagccgaagccaaccttcgtttggtagtttctattgctaagcgttatgtaggacgtggtatgtcattccttgatttgattcaagaaggtaatatgggactaatgaaagctgttgataagtttgattatcgtctaggctttaagttctcaacctacgcaacttggtggattagacaggcaattactcgtgcgatcgctgaccaagcacgtacaattagaattcctgttcacatggtcgaaacaattaataaattgatcaggatacaacgtcaattgttacaggacttaggccgtgaacctacaccagaagaaattggtgcagaaatgaatatgccaaccaataaagtacgtgatattctaaaaattgctcaagaacctgtttcattagaaacacctattggcgaagaggatgattcacacttaggcgactttattgaggataaggatgcaactagtccagaacaacacgcttcttacgaaatgttgaaggaacaacttgaacaagtacttgagactttaactgatcgtgaggaaaatgttttgcgtttgcgttttggtcttgatgatggtcgtacccgtactttggaagaagtaggcaaggtatttggtgttaccagagaacgtattcgtcagattgaagctaaggcattacgtaagttgcgtcatccaagtcgctcaaatcaattacgtgatttcatggattaattataattatctatattaaaagagctaagtttgatacaatcccactaaagtggacgattgaaatacataaagtattcaattatccatggaggtgggattttttatgtccagaaaaagtaaatattcattcgatcaaaagatatgggcagttgaacaatacttgaatggtaataggagcagcgttgaaatagctaaacggcttaagatgccaagtaaaagtggagcgatgcaagtaagaagatgggttcatcaatatcaaagcaatcgtgatacccttctaagtaatgctcaatacaataatcattactctaaggcatttaaagaaaaggttgttcaagaatatttagctggcaaaatgtcgttaccttctttagctaataaatatggcattagaagcaatggaacagtatcagaatgggtttccaagtataatagtcatatagaaaatcgggactatgatccccatccggaggtctatatgactaaagcaagaagaaaaactacccagcaagaaagaattcagattgttcaatactgtcttaatcacgacaagaattacactcaaacagctgtcaaatttgattgttcttaccagcaggtttacagctggacacacaaatatctagctaatggtgaaacaggattaacagataaacgaggcagacataagaagccagaagagctaactgagttagaactggctaatcgaaaaattaaggaattagagcgtcagctcaaagaagaacaaactaagaacgaattcctaaaaaaattagatcagttagaaaggatgtgcttgccggacaaccaagatacagacaagccgcaataaaaagacgctggaaacaagaaacatatcagttaatccatgactgccatcaaaagtacaattggaagattgatttaatgtgcaaatgggctaaaatagcacgctcagcttattacaaatactttgatcctaagcgcaagccgagtaagcgtgaagaacgagacaaaaagattgaagcaaagatcattgaaataaccaagtctaacaacagtctgtttgggacggaaaagatgaccatggcagttaatcgacagatgtctgatgaaaagccggtttatcataaaactgtttaccgcttgatgtgtatcaatggcattagatcacaaaagcctagataccagaagctaaagttcaagcatacaacgcctgagaaaacggccgaaaacaagttaaaaagagactttaatgcatctagacctaatgaaaaatggtgtacagatatcactgaagtcgttgctgctaacctgcctaaggcatatctatgtactgtgtttgatctatatgatcgctatcctgttggctacgcaattagtaaacgaaacgatactgctttagttcaagcagcctataagcaggctgttaaagcataccctaatgctcatccgcttttccatagtgatcgtggttttcaatttactcgcgcacctttccaaaaccaattaaaagaccaaggcatgacgcaatcaatgtctcgtgttggctgctgtattgataatggtccaatggaaggctggcaaggcattatcaaagaaatgcgagttattcttcatcctcaagtggccagttatgatgaacttaatgattctatttgtaagacaatagattactacattaatgaagatccacagaaacgttttaacggtttaactgctggtgaaatgcgcaaagaagcgatgaaaggcaatattaagaattgccctattgcaccaaatcatcgaattgagaaatactggcaaaaaatacacgaaaagaaaataagagaagccaaaaaatcctcagctgattattaatcaactgaggaataaaagctttatgtaattctactgtctacttgacagggaatgtatcagttttacttagctcttttttattggactggatctttacctgctgcccttagattatcttcaatgattttcattggatttaaccaagtgccattatctttccaatagtatttgcatggcgtattgtcatgctttttatcaatgtaatctttatctgtcttagtaactcctaaatgaatgtgagagccggtcagtttaccaattttttgtcccaacttgactttttgaccttttttaacataaatatcagtaatactgaggaagccttcctggtaaacttcaacatagccatcatcggaaataatccaaatataaagtcctaaacctggggcgtatttaacacgatggacagttcctgcatgcacagcatatacggaagaatgtccaacttcactaaatccgaagtcatagccatcatgaaaataactcttgctaggatagactcgacgaatgacgtcagtttcaccaaacttttgtccagatttaaatttgattttcttttcatagagcttcttaaaagggtaaccccaagtaagatgaacgacttttttctttttagcagtcttctttttcttaaccgtgtgagtttgtggtcgtaaactattcagattgttttgccataagggaatagaggcaaaagctaaaatagcaattaaagcagctaaaagtgcaaacttactttcagtttttttcattaaaatagctcatctcgctttccgtcaagcatatgttcactaattgtttgttcaaaaaatactggtaaatcatgatcaaaattgtaagctaacttttgctttttcaattctttagcactcatccaggttagtttaccttcgtctgattctttaacggtacccgaaaattgttcagctatgtagaaaaatactaaataacgttcatcattgtgatcataaaattgtttaacaccaactaattgaggatgactaatcgttaatccagtttcttctttgacttccctgacgacagaatcatgaaaagattcatgcgcttcaacatgaccaccaggaaaagtaagtcctggccagaccggatcgttgcgatcaagaactaaaacctgatctttgtttttaaccatgcacatattagttaatgtgacattttctgttctactcatgtaaaaaacccgctttctgtgacgattatatcaaatagtagcaaaataagactatgaaatatgctaaaatttggttaaccatatcttttatggaggaaacatgaatttaagattaaatacgttggcaaagatggtagatcctggcagtcgagtggctgatattggaactgatcatgcatacttgccaattgaattagtaaaaaatggcaaaattgattatgcaattgctagtgacgttgcagagggccctcttgaaaatgctaaaaatgatattgcagcagctgggttaaccgagcaaattgaaactcgcttaggtagtgggttagaaaccgttactcatgctgatcagattgatacagttgtgattgccggaatgggcggcaagttaatgactgatattcttgatagagcttggagcaaagatgcacaatttaaaactctggtactagaacctaatataggcgaagcaggggtacgtaattggctgatgatgcataattataagattatctcagaaaaattaattgcagaggctgggcatacttatgaattaattaaggctagcttaactgaagaaaagcatgagatgactgaaaaggaaatcttttttggcccctttattgtacaagaaaagaatccagttttttatcagaaatgggaaggccaactcgcttattatcaaagattcctggttaatttgaataaagcaagaaaaaaagacgaagatcgaatcaatgaagtagatcatgatattaaattaatcaaggaggaattggagaaatgaccaaagtaaaagacattgttgcgcgtttgcgacaagattttccggaaaacattgcttcacaaggtgatcctgttggtatgcaaattggatcaatggaggctgatgttaccaaagtaatgactactttagatgtacgtccccaggtagttgaagaagctgttgaaaaaggggttgatttcatcgttagtcaccatcctgtaatgtttagaccagcacaaaatttggattttgcgaatgcacaaaacgcaatgtatggcaatattatcaagaatggaattactgtttattcaattcatactaattcagataaagcccaagatggatctgctgattggcaagcagagaaactaggtctgcaagatgttgaaccattttgtctggatgatgatggaattgctatgggtagaaaaggaaagttacctagaacaatgactgcttatgattttgcctattatgttaaagaaaaaatgcaaattaaaatggcacgtctgattactgcaaacaatgaaaagccaattaccagtgtaggatttatttgtggggatggtggtaaatattggactagagccttagatgaccatttagatgcttttattactggggatgtttattatcatgtaggccatgatatgatttcatctggtttaactgttgttgatcctggtcattatactgaaaaactatttaagtacaaggtctatggtcgacttaaaaagtggaatgaagaaaataactggaatgttggaattgagctttccgaggtttctactaatccatttcaagacttattttaattagaaagagagttatatatggaatatcctaatttgttacctagatttttaaagtacgttaaagttaattcgcgttctgacgaacattcagatcgctttccatcaactgaaagagaagaaaacttccaaaagaatgttattatgaaagatttggaagaattaggtttaagtgacattcactacaatcaaaatgctggtagtgtaatcgctgaaattccgtcaaatgttgattatgatgttccagtaatgggctttttagctcatagtgatacggcagactttaattcagaaaatgttaaaccacagattcatgaaaattatgatggcgaaagcaaaattcaattaggagattcagagttttatcttgatcctaaagtttttccacatttgaagaattataaaggacaaacaattattacggcctcaggtgataccttacttggtggggatgacaagtgtggtgtgtcagaattaatgacttttgcggaatatttaatgaatcatccagaaattaagcatggtaagattcgattggcctttactcccgatgaagaaattggtactggtgctgaacactttgatgttgaagactttggtgctgactttgcttttactgttgatggtgaagctcctggtaagttagattggggtacattctctgcggcacaatttagtcttgatattcagggagttaatgttcacccagctgttgctaaggggcaaatgattaatgcaattcaagttggaattgactttcataatcaactgccagaacacgatcgcccagaacataccgatggacgcgaaggtttcttccatctaatgaattttgctggtactgttgataatgctcacttagattacattattcgtgattttgaacgtgatgggcttgaagagcggaagaatttggttaagtcaatcgttaagaaaatgaatgatgaattcggtactgaacgaattacacttaaaatgtgggaccaatattacaacatggccgatgaattaaagaaacatatggacatcgttgacttagcgcgcgatgcttataaagcagaaggtcttgaagtcaatgaagacccggttcgtggtggtacagatggctcacaattgacttatatgggcttaccatgtcctaatatttttgccggagaagaaaacatgcatggtcgttatgaatacacagttcttgagtctatgtggaaagctgttgacgtgatgatcaaaatggctgaattaaatgctgaaagagctaagtaagtgaaacatttttgactaaaaatatcaataattctatttctgatctaatatgagattattgatagattaggaaatagggtaaacatagttaataaataaaaattatgcactaatactattaaaaataaaagatagtttataattaccgtcattataggattatagactatctttttgttgtacttttaacttttatgaacttgtgaaacaaagtgattaaacttagcccttgcaaaaagtgactaaagtaagtattatagttagtgtaatagattaataatacagtacaaaataggagctgagtaaatggaatttaaagataatattcctatttatcttcagattgaacaatacttgtatcgtcaaattgctttaggcaagttaacagctggtgagaagattccttctgttagaaaacttgctctagaattaaccgttaatgttaataccgtgcaaagagcactacaacagatgaacagtcaaggtattctttatactaaacgtggcgaaggtaattttgttactgaagatactaaactattatccgaaaccaagcagtcattaattaataatgaattagaacagtttgttcaaaatatggaagagtttggaataggaaagaacgagttagtttcaacgttagagaattatttaaaaaatggtggggatcagaatgaatgatttattagctattaaagatgtaagttataagaaaaatcagaagcaagtattgcaagatgtgaacttgaatttagctcctggcaagattgttgcgttacttggtgaaaatggtgctggtaagaccactttgatgcgaattattgccggtgtagctaagaattacaaaggcgaaattaatttagagggggcaacaaaagagacagaaagaaaggctaagttgtcttttactgatggtttaactggcttcagcgattcaacaaagatcaaggaagtggttaaattttacgcaacgatttttcaagattttgatgagaatgaattcgatgagctgcgtaagtttatgaaattagatcctgaaatgaagttgagtcagttatcacgaggaatgcgtgaaaaattgattattgctttaacatttgctcgtaaagcagatttgtatttacttgatgaaccttttggtgggattgatgcaatggctcgaaagaaaattattaattccatcattttgtggaaagatgaaaaggcaacgattttaatctcagatcactttgtcaatgaaatttcatcattgcttgatgaagtggttattgtaaaagatcataccgttttggaacacaagtcagcagatgacattcgtcaaacgcataagtcaatcgaagaatactatgaaagtttttatgcagatgaggatgatgaataatgactagttttaacacattgtttaatcgaatgtttcaagaaaaaagcaagtcagtctatttaatcttcttaattcaagcctttgctagtttatgttttacaattattggttttgtttcggaaaatggtacaccagaatttgttaatggaaaagatactagttctgtcaatgtgattgttgcttttctcgctgtatttgcagtaatgatgctgataacgtcatttatcgctgattttgtttattggattatttcttcaatcaagaatgaaaaaattaatcgcagtcaaacttggcgcttgattccggtaactgatactaagtttttgcttagcaattttgggacagcatttttaacttatatttggttaggaattttagaagcggtcacgataatcgttacccttttgccgatgttgtctgatcaagatgtgcgcaaagcaataggtcaggctagcatccatctttcagcaagagactggcaaacaatgctcggaagtttgctgctaatcatttttattggctatgcttggtacgcaattgtaagtttgcttaacctagcaagccgcagcattattgattttttgccaggtggctcaagtaaagtatggacctttattattagagtaattgtaattattgcgattatttggattttaggccatgcggcaacaattatcttttcagtcttaggaaagtttagtccttttatggtcaacagccaggatattaactatgccactacgattcttcaattcttggtctttgatgttgtgattactttgatcgatatcttgcttttgaataaattcgtagaagcaaaacagaattaggagttttttatggcaaattttaagaccttgtttaagcaaatgtttgtgcaaaaaaggcgctacgctaacttagttttgttattacaagtttttgcagtcctttttttgctggtaatggctctgttagataaaagcaatttagcttatctcaacattagtaaggacagtaattggctagatcgtttgcttagtgcaggaatgctcgaaacgccgattgccgatgtgatttttgttggtctgctttgctggcaaaatgaaaaaatcaacctcagtcaaacttggcagctagctccagcttcaagtgtcaaaatctggctgattaatatgctttctagtttagttgaatgtatttatatttttgtaattcaagtcattttaggcttcgttgctgctatgattgataatttaagtcatcattattcactgcttcatgacttagttgatgctaaagttacttgggcagatgctagtttattaattgaatttctattgttcttaactggaacggttttagttattatgacttttgtcagttttgctaattttttgacgaaagtaattgttgatcaattgccagttaacaataatattgtcattaagttatttgtgatggcagtgattgtgattattgcaatcttgattgctgaacagctaaacgaacaaattactgctatgtatttgcatcgttttgccaaagaagcagcatatgatccattgggtatttcagtggttgagtactttgcaggagcaattgttttaggagcaatcgacagctacttaatgagtaaatttgtcgaacctaagataattaatcgttaattgaaggggaggggtagatagtgacgaatttttggaccttgtttaggcaaatgtggacgcaaaaaagaaaatttatttatttggttttcttaattaatatctttgtgcgattacatgttggcaaaatgaaaaaattaatctgagtcaaacctggcatttagcagctagcgatgaacgaaaaacatacttagctaatatatttagcagtttgctggcatgtggttatttcttcttgctgcaagaaatcgttaatagtctgttgctgatccctagttgcggggcagacagttttgctcaagcatttcgtgagtttggtctgtatccaattaaaacagttcccggcgttgaaataactagcaatcgaatgcttgcttttcattggttgtttatcattttgataattttaatcatttacttctttgtcagctttgccaattttagttcgcgagtaattactgatttcttgccgtttaagagtacagtttgggctcgcttgttaattatcgcaattttggtaattgtcgcagcttactgcggcatgatctttatgtctaagttacagggctttgttgataagagtccaaatttacaagcaaccgatccaatctggttagatgatttatgcttgtttattgttagccttgttttcggtattttgaatctagtattcgtgaagaaatatcttgaaccaaaaatagattaattaatgcaaaaaaagagcttcatttcaatcaagaaatgaagctcttttttgtagttaactaagcatttgctgacatgtaatcataaagctgatttacttcttcggctgtgaattgtccatcgccaactttcatggcgtgaactttttcaactgagaggtgactagcaaaggctaggtcagtgtcattaacatggtgttttacttgaaaattgataattgcatcagataattcttcttgctcattcataataatttctccttaccctctaattttaatcaaattggaataaaaaataaaattttttgcaatttcattgattaaaatgttttccattgcgtaaatggccaatacctgaagacgactcggccaactaatgcgctgcgcttaacaaaaccgaagtaacgtgaatctttggaaacatcgcggtgatctcccatgacgaagtaactatccttaggtactcgcttttttaaagtgaaattgttagtatagagttcacctaatttatgtgactttctttggtagccattatttaaatatggttctgcaatttgtttgccgttaatgtaaagcttatcatttttagaagtaaccatatcaccaggtgtaccaataattcgcttgatatacagagcacctttttggtctggtgcttttagaatgacgatatcatttcgtttaggcgtaaaatgacgtacagcaatcaaacgatcgccattctcaaatgtgggctgcattgatggaccagatactgtttcatttgataggaaaaaactaaaaataaagtagtaaattcccatcaaaattgcaaacataataattatgtctaaaacaaagcggccaatgctttcatcatcatttctctttttggtttcaaccatagaatatctcctttgcttgctagtcttattataactgaattctccgccgttgaatggtaaaatcatattaaggtgtttaagtatgacaaaatttttgacgaaattaacaaaattagagcaagagataaatcatactgcggttaaacgacaagttgaagaaatagcattaattgatagttatgtacaagcaggtaagccattgaagcgggcaccacgcagattaggtttattgccagatgaatttgaagaagttttagttgaggtgggaccagataaagaaggggccttaagggatttaaataatttacttaataattttcggcaatatctctctttaatatatggcatctggtctctgcctaatattcagactgcgcagttaattaaaaataagctgcatgtacaaacagcgttagaaatcatggcaggcaacgcgtattggtctcaagctttgactcaggttggaattaaagttcacagtacagactcattagagtgggccaagacgtcgaccactggagctaagcctttttatccagtagaagatttaccagctgaccaagcaattaagaagtatcacacagttaatctagttctatgttcgtggtcaccaaatttcggtcacggagatttagaaactgtggcagcttggcataagtataatccaagttgtcatttgctctttgttggtgaaaaagatggtgctactaattcaccagaattttggcaccaaaattggtttaaaaatagtgcagctttagacgagattaatcattccttgcaaagcttcgattttattaatgaacaggtatttgaaataaaaaatgaattttaaaaagatatttttgttactgattcttttattatcttttttaggaattggaacaatgctctccaatattgaatctaattatgctgacgaattgctggaagcacacggcttaactaataatacccgctattttagaacagatagtgatgataagattagtactttcctaaaatatttggacaaaaattatgcgaatcatcaaattcaactgcatctagataataattatgaaaaaaaacaagtgcttgtttgggctaatcatgccgttactggcttgccaactgagagtggtcgctatttttcgcctgatgattttaaaggacaggtttcttttgtggtgctggggccaacagttaaacttaatttattagatgtgcagaataataaatatgttattttaggcaaaaattattattctgttataggcgaatttaaggactatccacaggtagaaatggataaatattatctaagtacaggaattgatcagccaactgctaaagaccagctcaagaattatcgaattgtagtagatgcaacacctgcagtgattgaaaagattgctaagcattatcatgctagtttgcatattccgtcttttgttcaagagcatcatcgagatcgtttatctgtcgtgccggatattttaatgttagttgtttgcctattggtcggaatgatcacaaatatgttgcttgcaataggaattaagcgtcaggctcgtttaacacgtctacacgatgatttgctgcgcaattgggtaattaaccgcagcgtacgtttatttttaatagaggctatttttgcccttgctacatacttctttttaagatggcatgccttttattcaacatatggttctttaatagttacattaatagcttcctgggttgtaattgtattggcgttttgtgggatggtctattacttagtgagaaaggacaggaaaattgctaaatctaccaaatgaatttaaaactaaatatgaaaaattattaggtaccaaaaaagcacaagaactatttgcggcgatgaatgaagagagcaaaaaagcttttagaattaatacattgaagcctactaaggtttcatatgagcttactgattcagtaccgcaaataaattcagcctattatggtgaagtatcgggggaagatcctgagtgggtaagcggtagtgtttattctcaagatccagcggctatgtttcctgcggcaattagtggtgttcggccaggagagcgcgtgctagatctgtgtgctgcgcctggaggaaaaataacagcattaggagaacaattgaagggtgagggccttttagtagctaatgaaatctctgcaacacgagtaaaggcactacgggaaaatattgaacgttggggcatcagtaatgccttaattactaatgaaagtccagaaaagttagttccaattttttcggaattttttgatgtgattttagtcgatgctccatgtagtggtgaaggaatgtttagaaaaaatccggaggcaattgattattggtctcaagactatgttttaacatgccagaaccgtcaaaaagagatcctcaatgaagctgttaagatgcttcaacctggcggacgcttaatttattcaacttgtacctttgcaccagaagaggatgagcagattgttagctggttaaataaagaatatggttttacaattttagatacagggatacaaactaataagattgatgttggacagcctgagtgggctgatgggaatcctgatttgactaaaacattacgcttttggcctcaagatggtataggtgaaggacaatttgtggcagttttacaaaaagtaggtaaagctagaattgaaaaaaagagcaaaaacaaaaaagccaagcgtgatccgtggcgcttaaccaaaaatgatcaggaactagttggtcaggtaatggatcagtttaatttaccagttgctttaagtgactggcgtaataaagcaaaagtccgtaatgaacatgtctatattcctgcaatcagtttgcctgaaaaaagtaagcttcatgtaattaataatggagtcgagttgggtatattaaagaaaaaacgttttgaaccaggacatcaattggcagaagtgctaggtaaggtaaagcaagaacgggtttatgatttaccgacaattgaagaataccaaaattatttgcacggtgaaaccgttaaagtggacagtgatttgcggggctttgtgttagtcagctatcaaaaattaatatttagttttggcaaaatcgctggtaatcaagtattgaagaacttttacccaaagggattgagaaaatgataaaactaattgcgacagatatggacggaacctggttaactgaccagaaagactatgataaagaattatttttgcgtgaatttgcggaaatgcaaaagcaggggattaaatttgtagttgctagtggcaatcaatatgctaacttaatgactcgttttcctgaggttttggataaaatttattttgtagctgaaaatggggcattagttgctcaaggaagacaaattttgcatgttgactcgttaagtgatgacatatatcaaactttattaaaaataactactgaatatccatatccagctgtagtgatggggctagtaagtgcttatgttaaaaagagcagtggacgagcttataaacaagaaatgaaaaaatacatggagcatattactgtagtagattcttttggagaaattgatgatcagattttcaaggtcagtctgacagtgccagaagataaaatgtctaaaattttgcgcgaattaaaagaaaaatatccggaggttggttttgtttctggtgcagcagactcgattgatatgcaaactaagggaatgaataaggcagtaggtctagcatatttgagtcaaaaattagggatcaaatcaagtgagatgatagcttttggcgatagcggtaatgatgtaggaatgctgaaatatgtaggccgtagttttgctactgcaacggcgttgccagaagccaaacaagctgcagggcaaattattggttcaagtaatgaaagtgctgttcaaaaagaaattgctaaattgcttgaaattaaataaggaaaattatgtaaagtaaaagcactagtaatcattaactagtgcttttactttacagtaactgatcgatttgagcctttaatggtaaattatagtatttttttatttgtaccagggatgctaaatcttttttgccgtaaacagcaattaaagcagccaattcatttttccaattagtaattaattgctctaatccagtactaccattttggatgtattcttgtaaaaaaacatttgaaataccaacaaattttcctcctagagctaaaccttttaaaatatctaggggattacgtactccaccagaaacataaaatttaacttgctcttgccatgccatcagagcagtcaccacagtaggtaaacctaaatcttctaagtatgaaacgtcactggcattacgtgcattctcaatctgggcaaagtttgtgccacccgaaccggcgacatcgaagtattcaatgccatttacttttaaaagatgaatacttgtttgatccaatccaaaaccgacttctttaataataatgggcaaatcgatagcggtacgaattgctttaattgaatcaagccaacgaaagtcacgatcaccttcaggcatggcaatttcttgtattgtatttaaatggatctgaagcgcatctgcatttaattcttggataatttgtttaattgcagagattggtgtttctggattaacattaacaattagtacaccatctggatcttctgctctggcaaccataaaactgtctagttgatcagtttccttagctaaaatgctggcagatcccaaagctagggcaatattttgctgctgggcaacctgtcccaatgcttgattaatttgtttagaagcagctgagccaccagtcatagcattgataaaaaaaggcgcagaaacatttttgccaaacatttctgatcccagaatagttggatcgacttttgtttcaggcagagcagggcgcaacaaatgcagttgatcaaaactattatatttttctttattaaaaaacatctgagctaacttcagatgttcttcttttctttcagatctaatcgacatagaactctccatcaatgagccatgataatctggtgaaccttaaaattaagaggcataattccattatggcgccattcgctttcaagtgcttcaacatcggtattagcatctgtaatcacaatgccacagtcaccattaccagcaccagaagttttagcagctccaccaaaattttctgcaattttgattaattgcgataaacgtggaatttcaatggcaatttggttaattttggcaaagtgctgcaacaatttacggttagcccgaatttgttgtttgattaaagcaatattgtttgcttcgaaaccttgaaccatctttaaaacacaagctctagaagctgctaagaaatttttatattccatattcaaagccgccttattagcgttagtttcatcaacgaggcgtgaagttgatgctggcttttgactccaaccaatcatcagtttcatatctttaggaggagttagtaattcaacttttaagccaggccaagcttcattaacgacttgaactaaagtcttattagctaattcttgctttaaccattttttgtcaaaagtttggtaagctaaccagccgccatagacactagctgcaatgtcaccagctgagccatttccttgaactgaatagtgtgaaatagccgataatttataaaccagttcattgctcatttttacgccataaaaacgcaagatagctttaactgtagctactgtgacggctgcacttgaacctaaaccatattttttaccatctgcagaatctaagtctgaattgacgtgtaaatcatagactttcatcttgatattttgctcaatacaatattgttcagtaaatgaaatagctgacaaaatatattcaaaagggttgtcacgattatcgattaccatttttgagccctgacgaacccaatgaatcgaatcctgtgagtattgcttggagtgaattaagccagttgcccctttactcttagtgattgacacacgtacaaattggttaactgctactaaaatagcaggacaatcttgctctaatactgcatattctccggcaatatataactttccgggcgctttttctgttatcaaaagaactaaatcctcgaatctaattaacttttttaattacaactagtccaaataagtaattccaggaccaaaacttgcattcactatattaacattattaaattcggacgaaaagcgttgaatgatatctttgctatttcttaattggcaaagtaccttaatatttggtcctgcatcaattgtatagtaacattcaattccttcagtacgaagttgttcaactaatttaatagcttgaatggtttgcggctcaaagtaagtgaattcaggctgtgcagttaaattaattgcatgcatttcatttgcatttaactcagctaactggcctagggcagtgaaatcattactttttatagctttgatcatttcatttaattctgaattgttgcgttcaagccagggcctgaaaaatggagaagattgggcatctttcataccataagtcgaagaaatctttttttgtttggtatttaattcaactgctaaaaggtgaagatccatcgttggtgtttcatctagtgcatatgcgtaagatgtttcgtcgctattacctttttgccaaacagcaaaaccgccataaacggagcggctggcagaaccagatccaatcctggctaaacgagataaatcttctagatcaatgttgatgtcatagcattgacaaaaagcagcagctagtgccgcaaaagcagaactagatgatgctaatcctgcagaagtagggacgtgattgacagatttaacgattaaattgccagtgacgtgaaaacgagcctgcaatttttttagataagcaaaaacacgttgactagctgcagcagtttgctgttgattatttaagaaaaattgattttcaccatctgttttttcaacgctagtatcagtataaaaagcatctaaagtcattgataaactagacattaaaggaagacgtaatttgtcgtcagctttgccccagtacttgattaaagcaatgtttgtatgtgctcgtgcggttctattcattaaatctcctcaatccagtagtcactaattaaatctttacatttagaggcaatttcttgggcgacagtttcgttatcgcacaaggaaatagtaatgccgccaagacctccgcctgataatttaaagcctaaagcgttatttgacaaggcaattttttgcagttggtcaattttatttgttgaaagatcaaatgagtgcaaaatttcttgtgcttcattaaaaatctgtccaactgcttgacgatcgtgcttgatccaagcttttttagtaagatccgctaattcacccaagcgagctatttttttcttggcatagtcggacttttcaagcatttttttaactaaaaaaacagcttcctttgtattgcctagttgaccagtatccatgattaacagggtagctcctaatttggtttgtaatattttaggccccatttttttattaaaaaaaactagataatctgaattaacagtggctgcatcaagaccagaagctttaccatgattgatcatttcagcatgattagttacagtcataatttctttttcagtcatattcagctgaaagaattggttcattgccctagtggtacctaatgcaacagtagcacttgaaccaaaaccacgttccattggaatttcaccagtgtatgtaattttaagtggatggttattgccagccttttttttcatatgtttaactacgtattttaggccatcatattctgccggtgcttcaaataatggaccgtggtagcgagcggtatccatccacatttgagaagcagattcaacagtagttttaatgtgtaaagccttaattggcatagctaaagcatcatatccataaactactgaatgctccccaataataattaccttgccatgagctaaatagctgcttttcatttttaatcatccttaaactagatttatacaaaagattgcccttgctatgataaaataaaaagcaaggagtgcgaacaaatgatcaaaattcttacaggacgacaaaccgacccattacaagaaaaaattctggaagaagcagttgaaaactatcagcaacacccagaacaagaaacttttatcatcgttcctaatcatattaagtttaccacagaaattagggcaattaacaaattagcaacaagcaaacaacaaactgagactgcagttaaaaatttgcatgttttgtctttttcgcgtttagcttggtttttcttaaaagatgccgagcaaggattgcctaatcaactagatgatgcagctagtgcaatgctcttagctcatattattgagaacaaaaaagatgaattgactatttttgaaaatgttaatgttaattctggattagtaaatcagctttatcagacaattttgcaagtctatgacggaaatttagatttagacgagatatcagaggataatttagatcaagaaactaaaaataaattacatgatttgcggattatctatgatgcctttattaaagaaattgcgggtaaattctctactaagaatgaggttcagctgcaactaaatgaaattttagctaaaagtaaaaatttaaagcaagccagtttttatttctgtgatttttcacatttttcattacaggaaacactaacgattaaaattttgatgcgtaaagcaaaagatgtaatccttgcatttaaaacgcgcttaggtgaaattaattctagtgcggaagaaggagattatgattatgtaatccagcaaactattaagcgcttaacgctgttcttacaagagagaaagatggactacgtgacagcaacttttccgcttaattcgcaatcaaatggtcgtgaaatattaaatagtctttggacggagacaattcctaaagttgacgaattgaagcaggtacaattagttaaagcagactctcgatatgcagaggcttattttgtagcgcggactatttatcaacaggtagcactaagcaactatcgctatcatgattttttgattttagctccaaatttaaaggaatacgagacttatttgacgccaattttacgtcaaaatcagattccattttttaatgatttacaacaggaaatgaagtatcatcctctggttgttttaattgaaagcttatttaacttacatgagaatccgtttcaaacacaaaatatgctagccatcctaaagacacacttgttaataccttcttggtataaggaagaggcggagtatattcatgatgttgatgaactagagaattttgttctggctcatggtattaatcataatttatggaaaaaacactttgataattttgtgaatgctgaagtgatccgcttagacaaaatggatgatgaagtagctaagatcgatcgtttgcgcagctacttggttgataagatttcaacatttttcaaaataatagagcaagaaaaagatagtcaaaaggcgttaacgatattttttgagttcttaactaagaacggaattgccgaccgattagaaaaatggcgtgatgaggccaatgaagccggtgatttacagcaggcgcagcaaccagagcaattatgggatttattaatgcagctgttgcaagactatttagcaattaatcctgaaacttttgatttaaatgaattctttaatatgttaattagcgctttccgagaagcaaatttttcccaaattccttcaacacttgatgcggtaaacctttctgaaatggggatggtacaaactagcggctataagcaagtgtttatcattggcgctactgctaataatttaccccaaattcagaaaatgccaggttttttaactactgaaaacttgaatcagctacaaaatagttttaattcagaatcttacttagaagatagtcaacagcttaataacttagaccaaaattatcagtttggtttgtcgctagctttagcacaagatagggtatatgtatcttatccagtacttaatgcttcaaatgaagagcttgatccttcaatttattatcaacgtttaaaggattatggtgctcagcaatttgttcaacatgatttgccagaaaagatgcaggatcttttgtctttcattactaaccctgatgcaagtttaggctatttaacctatatgaattcaataaattcaggtcttgctgtgcaagagttattaaaaatcacacaggagcaactacctcaaaaaacgaagacagtgcttgaagcaagtgattttgataaccagccagaaaatattggtcaggacttggctagtcaattgtatggtcaaaacttgaattcatctgtgtcacaactggaaactttttatgaaaattcatatgaatatttcttgaattatgggcttaagctgcggcgacggtttgaaaatgaatttgatgttattcaggctggaaactattttcacgagacttttgaccgtttagtgaaaaaactaaacaagcagcataccgacttagcagatttaagcagcatagaactggaacaaatgcttaattcggtgcgaaatgtgatgaaggatgaaggaaaatattctcaattaatgaatgatccttttaatcaatatcttttcaagtgtctagaccatactacttctaaggtagctcataattggcggcgctccttgaaggaaaccccgttacgggctaagtattctgaattaagttttgggttaggtgaaaaaatcaaaggattaagcttaaaagtgccagatatatcaggtcaacataaagttgatttgcgcggtaaaatggaccgggttgatttggccaatttcaatgataaggatcaagttttagcccaggttattgattacaagtcatcagctaaaaaatttgatcttgggatgttttataacggaattgctttacagatggtttcttatttggatgttttgactaaaaatgatcaattttttgctggaaaagatcgtctttcattattgggtgctttttatcaaactgttactagacaattagaacgtttgaatagcaataaactaattgatagtagtttaaatttgaaaaagggagcaactgatagtaagcccaagctgatgtatactggcttaatcagcaatgatccagaaatcttagtagaagctgagccattacttgatgatcatcctagctattcttctgaactgtatactggggttaaaactaaggctagaggtggctttagcttgccacgtgaccgcaactttagtgaggaagaaattgaattactgctagaatacgatgagtatcttattcgacaagcatcaagccaaattttatctggaaaaattgaacttaatccatatcgttatggcaaagcgaagaatgccttaacttattctgattatcgtgatgtcttcttttttgatgcgatgctgcgtcaaaatcaatatcatgaaataaacaatctgaataaaaaagaattaattcttaaaatcaaagagaaattaggaaaggaacaataaaattgtctcaatttactaaagagcaacaacaagcaattgatgatcgtggtcatgatattctggtttctgcttctgcgggtagtggtaagacaactgttcttgttgagcgcgttttaagggagattctttcgggaacccaagttgatgaattattagtaattacatttaccaaagcagcagctgaagaaatgaaaactagaattaaacaggcattatcagctgaattagcaaagccgggatctaatcgcagatatttacgtgagcagctaaatcaagtggatactgctaatatttctacaattgatgcattttgtctagaagtaatccatcgcttttattactctgtaaacttagatccaagttttagtattctaactgatgatactcaagctgcattgttaaaagaacgtgcattacgtgaaattgaaggggagtttctagaaaagaaagacgtaaattttaggcatttttatgataactttgcaggggatagagatgcggatagtccgcgcgacttgttgctggatttgtatgattttgccatggccaaacctgagtatcgctcatggttaaaaaaattggttgatgtttacgtggttaatggcagtatcgtggaatctgatttgtggcaaaaacagattaagccatacttgcttactagtattggcgacttacaagggaaaattaatgattatttagaaaatccagtaatagaaacaaaagagctagctaaggctaaggaagcttttaccttgtttgcacaaaatttagatcattttgtttttgctttagaaaatgatgcagactacgataaacaacgaaaactattacgttcgtgtgtttttacagcgaattatcgtaagtcaagtaaatgggatgaagatgttctaaatttttatgaagacctacaaaagttaaaagatgaagcaaaaaatttggtttttgatacttttacttcattttttgctgttgatgaacaagaacaaattaaagtcatgcagcgcggccaaaagattgttgctgcaattgctaaatccgagctagccttgattgatcggtttaataagctgaagcgcagtgaaaatttgcttgactatagtgatatggaacaattggcttatcagattttgagtcaagatacatcgaattctcaaatggctcgtgaattttatcaaaataaattcaaagagattttgattgatgaatatcaggatattaatgctttgcaagaaaatatcatccagcaaatcaaaaataaagataaaaatacgcttttcatggttggtgatgtaaagcagtcgatctatggctttagacaagcagagccaagcttatttttgaaaaaataccatgattttgccaatgatgataataaacaaaccaaaagaattctgttgtcagataatttccgctctactgagccggttaccaaaattgtaaatcaagtatttaaaagtgtgctaagttcagattttggcgggattgactatcaaaaagaaggacaattaatttttggtgctaagtattatcctgaaaacactcctaaagctagtgaagtaattgttcatgaaaagaaaaatagcagtaatgaagatgaaaatgagatagatttttctgaaattcaaatggttttagcacgtattaagcaactaaaagaagagcgtgtacaaatctttgatagtaaaacaggaatgagagagttacgttacagtgatattgctatcttgactagaagtcgtagtgataatttggaaataatgcaggaatttgctaagcaggatataccattatttgtaactgatgcgaagaattattttcaaacttttgaattgactgttatgatgaactacttaaagatcattgataatcccgatcaggatattccattagtttcagttttacgttcgcctttgtttaattttggtgaaaaggatttagctaaaattcgtatcaagagtaagaactctactttctatagtgcattgacttcttatgtaggtgtaggagatgaattaagtactcgaatcaaagattttttaaatcaactagctgatttgcgcaagtttgccacggcacatcgtatttctgaattgatttggagcatttatgctaggacaaatttattagagataatgaccgcactacctaatggtgaacagcgacgagttaatctagaagctttatatgaacgtgctgcttcatatgagagtgcagggttcaagggattataccaatttatcaattttattaatcggatgcggcaaagtcagaaggatttggcacagcctttattaactaaagaagctggtaatgcggtcagattaatgactattcatggttctaagggactagaatttccgatcgtgttttatgtggggatgcagcataaatatcaaatgcgtgatttaaaaggtaactatgtgattagctcagatagtataggaattacgctccgtgaagaacattatcggattgactctttagttaaagcgatgggaaatgtaactaaaaaaaggcaattattagaagaagaagcgcgaattctttatgtagcattaacgcgggctaagcagaaattaattttggttggcgatgttcctaatctggataaacgagttaaagaatggtcgactgaactaaatcagattggtcaattatcattagcagataagttatcttccactagtccattgagttttatgggacctgcgttggctttagatcgacacctagctgtgaaaatgtctgatattactaattcgttggataagagtcagtcgtttttatatattaattatgaaaatgctaacggtgaactacctgattatcagaaagcggagacaagtaatgataaaacgcaaagtaaccttttaaatcaaaccactaaacggctttatcaatttaattatccgtttaaagatgctagtgaaactacagcttaccaagcggtatctgaaataaaaaaagcattcaacgatccgatcgagaccgaattagagaatgcccacttattgacatcgactaatcgttatttacaaccgattgatactaaacctaatttcttgtatcaaactaagtttactggtgcagaaatcggaactgctacacacatgattttgcagtattatgattatcaaggcaatggtgctgaagatcaactagaagtagaaattcaagaattgattaagcaaaagaaactgaatccagaaattgtttctagtttaaagaaagaccaaattgagtggtttgttcatagcaattttgccgaggaattttggcaaaagccagagaatttaaagcgagaaatagatttttctagtttaatctccgctaaaactttgtttaaaaacttttcagatcctaatgccaaaattttggttcatggtacaattgatggctattttgtcaaaaatgatggtattattttgtttgactacaaaactgaccacgttgatcaatcgcatttatctgaatcaattgaattgattaaagaaaaatatacaggtcagcttagactatatgaacaagctatcaatgaatttagtcaaaaaaaagttattggaaaatatttaattctgcttgatgctaaacaagcggttgaagtgaaatagaggaaggaggaaattatggcaaaaagttttactaaagatacatttgctgtagttgatctagagactacaggaacgcaacgtgagaatgggcatcatattattcagtttgggtgtgctattattaaaaatctcaaggtagttaaaacttattcatttttgatcaatccgcatcgtgaaataccacaatcagttgttaatttaaccggaattcatgatcaagatgtagcaaaacaaagagattttgattattatgcacccaaaattactaaaattttgcaaaatactgttttcgtagctcataatgttgactttgatttgccttttttgaattatgaactagtgcaacatggttatgaggcacttacaaataaagcaattgatactgtagaactggctaagattgcttttccgacttttccatcttataagttgagtgatttgacaacacaattggggattaaacatttagatccacataaggcagattctgatgcttatgggactgcagttttattgcttgaaatttttaataaattagaaagtctacctcaagctacactgaataccctcagttcattatctcatgggcttattcgggatacatcttgggtgattacaacgattgcagataatttacgtcaagaaaaacggcctttaggtaaagaatatatgcaagtgcgtaatattattctgcaaaaacaaaatgataattctgaagcacatggtgggaatgctaaattcccaaagactgactcagagaaacaaaagctatttaaaggtcatttacactttcgtagagctcaagtcgacctaattaatcatttgcatcagtttattaatgatccagataaaagggcgatgctaattgaagcacctaacgggactgggaaaactttttcttatctttttgcttatgcttatcagctttattctggtagaaaattagttgtagctacaccaactaaagtgttgcaagaacaagtgattgaacatgaaattccgcagttatttaaggtgactaagttggatttgactgcagaagtagttaagtcaagtagtcgttaccttgaccttgacggatttgtacagacgatttttcaaggtacaccgaataagcaaaccttgatattacagatgcagatactggtttggctgactaagactaaaactggtgatttagatgaattaaatttaactaactataatgcaccactctttgcacagattcaacatccaggggatgcaagagtaggtagccgttttgcaggggtcgatttttggaatttagcgcgtaaacgacaagaagaagcggatatattgttgactaatcatgcttatttggctaaccactatatggatacaatttggggtcagaatccgtatttagtcattgatgaagctcatcgtttcacagacaatgtcgtaagttcgcgtaatgattctttgcgttttgaagctttgtggggagttttaagtcatctccgtaatttgctttatttctcagatgaaagtgttgaagcgcaatttaatgatgatgtgcagctgaaccttttactaaagaaaatagatcctaaaattttggaattaattcagttaattaatgaattacaaaagcaactttattttcaaagagataatgctgttaatcggacagttttagctaatggtaatctagaacttagttttcaaggaaaaagtttatttggcggaaatagcaagtttaaagcgattttacctaagttccaacaaaaattagaagaggttagggacttaactaatcaggttttatttgaattatataatgaacaagaacgcatgctggctaatgttgaggtattagtcaatgagattacggaacaaattgatcgcctagattattactctgaaaagggctatcaattggctgatttgctttctgatcaaaaaggtttagagcaagatggctttattttgatgattactaatcctgatgatccactaagtaccaatttagactggttaatgcttgatgctggtgaagtattaaaacaaatctatagtcgttttgaccatattgccttcgtcagtgctactttaaccagtaatcgaaattttgaatatgcaatcaaccagttagctttaacagaattacatccgattgaatatattggtaaaagtacttttaatataaaaaagcatttacaggtactggcagttaataatatgcctagccctgatagtgaagaatttgaaaagactattgcacaaattttacttagtgacattcaagataagcaccatgtacttgttttgatgactaatttagaaaaaattaaaactgtttttaccatgattatgaatgagccacagctaaaagattttgaaatcttagcccagggattgtctggttccaataaccgaattgctaagaggtttgtaattgctaaaaagtcaattataattggtgctgatagtttttgggagggaattgattttcatgattgtgggattgatactgtttttgcggcaaaaatcccgtttgaatctcctgatcaacctgaagttcgtttaaggcagaagaaattggaagatcagggaatcgattcttttactaaagatagtttaccaagagctgtcattcgttttagacaaggaatgggccgtttaattagaggagaacaggatcatggtcaatttgtaattttagacccaagattatggactaaagattatggtcaagagttccttcaaacgattcctgtcaaagttgaaaaggttactagagaagaattaaaaaagaaattagaaaataaataattatgttacaagatgatacaagacaaacaatcaagtttgtgagttgggtaattggtttgataatagttgcctttctagccagcattgctatcttttattatgctggatctagaagtcggggcaatgatcaaaaagttacgcaattggctactagtaaaacaccaattagaaagattcaaaactattatcatttagatcgtggcactagcagctatgctatagcaggcaccaataataagggaaaacaatattactttatttatttgccaaattctaaaacggcatatctatatcctgcggccaaaggaatcactgaatctaagattaaaaataagtttaaatctatccatacggatgctacaataaataatattaatcttggttggtataagggtgaggccgtttggaaagtggcctacaaaaaacaaaacggcaatctaggttatactttatatgaattcaaaaatggaaatgatatctcagaagtcgataatttatagaaactttggtattatggaaactgtataattgatgaaaaggtggataggattttatgacagaattgatttcaattaaagattcttctaaacatgttgatgaagaagtcaagatgcatgtttggttaacagataaacgatcaagcggaaagattatctttttgcaattacgtgatggtactgcatttttccaaggggtagtacgtaagaatgatgtatcagaagaagtatttgatactgctaagtcacttagacaagaagcaagtttttacattactggtactgttcatgaagacgcacgttcacactttggttatgaaattcaaatcactgatttaaaagtggtttcaaacaatgaaggttacccaattggtaataaggaacatggtgttgactttttacttgatcaccgccacttatggttaagatcaaagaaaccatttgctattatgcaaattagaaataccatgtttaaggctactgtagatttctttgaaaaagaaggctttatcaaatttgatgcacctatctttatgcattcagctccagaaggtactactcaattattccatgtagaatactttgaccacgatgcatatctttcacaatcaggtcaattgtatggtgaagccggtgctatggcttatggtaagatctttacttttggtccaacttttagagcagaagaatcaaagggtcgtcgtcacatgactgaattctggatgatggaaccagaaatggcttggatgcatcaagatgaatcgttagatattcaagaaagatatcttgcctacatggtgaagcaagttctagaaaataatgaatatgaacttaagattcttggtagagatcctgaaaaacttcgcccaactactgaaggtaacttcgttcgtcttccatacgatgatgcaattaaaatgcttcaagatgctggacgtgatattaagtggggcgatgactttggtgctccagatgaaggctatatttcagaacaatatgatcgtccagtcttcattgtcaactatccaacctcaattaagccattctatatgaagaagaatcctgataatcctaaggaatacttatgtgctgatgtaattgcaccagaaggttatggtgaaatttttggtggctcagaacgtgaaggaaattacgaaatccttaagcaacaaattcttgacgctggtttgaatttggaagactaccaatggtaccttgacttacgtaaatttggtggagttcctcactcaggtttcggtatgggctttgaacgtactattgcttgggtttgtcaccttgaccacattcgtgaagcaattccattcccaagattgattaacagaatgcaaccttaatttggttaataattaaatattgatacacaaagttggactagttattagttcaacttttgtttttgaaaggaaattattttggaatttaatgattatcgggcattaggctttacaaccttacaaaatggattgatcgcttactaccctcaattaggcattagtgatgctgaactaattttgataatccaattggaagcatttagccaacgaggtgagagttttccatctaatgaaaagattgctgctaatactaatttatcggttagtgatgtgggtaatcttattcagcggctaattgaacgaaattatttaactattgaacaaatgactgatagtcaggataaaattggtaataaatatagtctcaataagttgtataatgcacttgatcactatattgatcaaaacgtcttgatcaaagataagaaaaaagataaaactgtttcagttgctaataatttagaaaataatccgttaaattatttatcacgaaaagtagaagttgaatttggtcgctatctgagtccaattgaacgagaagagattgcgcaatggttaagtgtggatcactatgctcctgaattaattgaacttgctttgcgagaggctgtattgtctcaggcatattctttaaagtatattgatcgtgttttacttaattggcaaaggcatagtctgaaaacaactgatgaagttgagagatttttgaaaaggaatcgataaaaatgacagaagatttattgagtgatgaagaagcacgtaaagttttgaaaaaaattttagcattgtatcctgacgcacaaggtgaattgcaatgggatactaactttcatttactttgtgcggttatgttgagcgcacaaacgactgataagatggttaatcgtgttatgcctagttttagtaaaatgttcccaaccccagaagtattagcaaaagctccaattgaagagattgagcatgagataaaaactattggtctatttcgttcaaaagctaaacatttaaaggccactgcgcaaattttggtcgataaatataatggacaggttcctaaggataaaaagttattgatgaccttaccaggggtgggagagaaaactgctaacgttgttttggctgaaggctatggtgtgccagctattgctgttgatactcatgtgtcacggatttctaaaaagttccatattgtagatgacaaagctactccacatgaagtagagaagcgattagaagcaattttacctaaaagtgaatggataaaaacgcaccatgcgatgattctatttggtcgttatacaatgccagctcgagctaaaggcgatccgtattcttatttaaattccgaaaagtaaagccgaaataaattcggctttttttattgaataattttatataatctgttgttactaaattttaattttataatttcaggcctcaactacgtttcggccaaaataaaaacaaataacaaaacgctatctgttaataaatatatttaattattgcctagtcattatccgaatcatcattacgttcatgtgattcttcctcaggttttctcgttgatgaactttgttgtgttgaagaagattgtgtttttctttgagaggaagaggctcgctgactgctattggattgagatgatgagccattttcacgacttgatgatgattgagtaactgcagttctagaagatgaaggagtagttccagtattatcgcttgaagtatcagtttcttcatcgtcttcatcataacttgctgcactattaccaattccggctggggcatggcctcgaacaaataattgccaagtgccgccactagttgctaattctggaggattagagttatttacaattttcgctcttacaactgagctaggctgtttccagtctaggttaggtttattgttcattaggtaggtcatcatactcttatacattagctgtgcagattgttgacctattccagagatagtaccgtcctttaaattatcgtaaccagtccaaacacccataacatatgatctggtataaccaacgaaccatgaatcttttggagttgaattatagcttgggtacttagctagatcttcatcagagtatttaacagtaccggttttaccagcttgataaagatctgcaatttttgcattagtaccagagcctcgtttgattacgcctttaagcatatcggtaatcatataggcagttgatttcttcattacacgtacaccatttgaatcataatttctagttaatccatctggtgtttcaatcttagaaacaaattgcggcttgtggtatacgcccatggtggcaaaagcactataagcaccagtcatttgtaaactagacgcattagcgccaattgcaactgataagccggattttgatgaaacgttaacgcccattcggcgagcaaaagctgaagcccgttttactccaacttcagcaagagttttaacagctggaacattacgtgactgctccaatgcatgtcgcatagtcatcatcccgtcgtatttgttgtcccagtcatataattggatattggtaccaggataaacatacttactgtcatcaatcatttttgctgttgaccaattcaagtattgaatagcaggtgcatagtcaagtactggcttaattgacgaaccggtagagcgtccagtttgaacagcccggtctaatcctaattgaacagaaggtaagtgacgtccacctaagattgcaacaacatgaccattgtttggatcaactacagttgcaccaatttgcattttattgtttgtaaaaggtacagaaccgttgttagctaactcgtacagcttgttttgagctttttgatctatattaatagtaatctttaaattatcgtgatatggatcaaagcctttgctcttaacttcagaaattacctctttaatgtatggatcatcaatttttctaatcttagactcgttattatttcgatgtgatttaagtcccttactaattggttcagcaactgcttgattgtactcagctttagtaattttgtcattttgtagcatagtctttaaaacaatatcacgccggtatttggccttttgcggataaagatatggatcatatgcaacaggtgcattcggcatccctgcaatcaatgcagtttgtgccaaatctaacttacttagtggcttaccatagtagtagttagaagcagtacccatgccataatttccatagttcataaagactttattaatataaaattctaagatttggtctttactgaattcatgttggactttcatagctaaccaagcttcttgagcttttctcttcagagtacgttgagaagcagcagtagagaagaccgttagcttaactaactgctgggttatagtagaaccacctgcagcaatactattacttttggcattagttaacatagaaccaataattctaattgggtcaacgcctaacttatctttgtaaaaacgtttgtcttctactgaaactacagcatcttttaattgctgaggaatgtctttatttttaacataaattcttttttcagaaccaagtgatagtaaaaacttaccattattagtatatagacttgaagatttaccactctgcaattggtcctgactaatgttaggagcatctttggcataaaaagcaaaaagcccgattccagagattactattaaaaatatcagcaaaaagatccatttaatgattctaatccataagtggccactacttggccttcgaccatgatagtctcttcgtgattctcgtttcatattattgttattatctgccatgattatcttttcctatctgcaatgaatttatctaccgccttaagataaggcagtgtaggacgaaagccacttttgatttcaaaagaattgttttcaatttcttttaaagtcattgagcttttatctttttttcgccaagctcgaattacaaaactagctggagtaacaaagtagcgctctaagctagcgaacctaataattgtaaaacaaattccttgttgttttaagcattcgtccaagtgaaaaatttggtgttcatgaaagttttttaatgggaagttagttttattccgtgtttcttttgcctcaaaatcgagatagtatcctttataaacaccattatagtcagttgttgaagcttgcctaaagtaagcttcacgaatgaccgccttagaacgtttgggataatcaactttaacaatttgaattggggttggctttttatgaacaactgcaatttcttccattaaataatatttattagattcattgatttgttgctcaagtgtcatcccacgatcagaaaagttaacaccttttttatgatgatatgatcggtgaactggatgttcatcttttttagttacaggttttctaaatgcggctaaactaccgctaggatatttgaccattgtcctcactcctgttagcattatagcaataaagactacatttttgaacataaaggggggcttaaacaaatgcagcgtttatgggtgactggctatcgcagctatgaattaaatgtttttggcgatcgtgatcccaagataactgtcattaaatatgccctaaaaaattatctgacaagtctactggatgatgggcaattggactggattattactggagctaacctcggtgtcgaacagtggacagctgaggttggacttgaattaggagaaaaatatccggtaagaacatcaataatgattccatatgaagaatttgctaatcgatggaatgatagtaacaaagctaaattcttaaatttgaaggaaaaagtggacttttttgcttcaacttctaataccccttatcaaagtccacttcaattacgtaattatcaaaattttatgattcagcatactgatcgagcattgatgatctatgattcagagcacccaggtaaacctaaatatgattataatttaatccaaaaataccaggaaactaaagaatatccattagatttaattgatttttatgatttacaagatgcagctgaagaataccaagaaaatcatcaaataaatcatttttctgaataatatggtaaaaattttattaaagtctgtttctttattttcagtcagcgttgtttttgctaaaatagggtggaatgtaaaggagttgtcagtaagatggcaaatttaaatgatataaaattatcaggacaagatatattaaagaaacaattcaaaagtaaagtaaagggatatgatcccgatgaagttgatgcatacttagatgaagtaatttctgattatactacttttcaacaaattatcgaagatttgtatggtcagatcggtacgctccaacgtcaattaatggatgaaaagcaaaaagcaaagaaaacagttgaggctgaagaagaaaaggttaagacttatatgccaacgcatagaagaagtgcgcctgtgaagtttgcagaagatgcagatgatactcaaggtgaaatttcgactaatatggctattattcaacggatttcaactttggaaagaaaagtttataatctagaacaacacgtttatggattaaagcattaatttttgctataatgactaacagtgtgaattttgagtaggcgcggctagcttatgttagctgaggaaagtccacgcacacacagactgcgatgtttgtagtgatcgtattcagcctaacaagctggaggaggacgttagtcttcacggcggaaaaagtgctaaatcttcggacatgcattactatcctgaaaagtgccacagtgacgaagcaaggtcagaaatgactttggtggaacgaggtaaaccctgcgagtgtgaaacccaaatttggtgggggagtttcggcctaaggaaatgaactaaaggtcggattattgctttaagcagtaaagatagatgactactgaaggtaatctttgccagagattattggaacaaaacgtggcttatagaaattcacacaggcagagttgggcttttaggtccagctcttttttattttgaaaatgaaagagtaacaatgaaagaataccaactttacgcaactatgggcgctggttttgaaagtgtcgttaataaagaattacagtctatggggtataagacccgtgttgaaaatggtcgtgtcttttttaagggtggtcaagaagatatagttagaactaatctttggctgagaacagctgaccgaattaaaattttgctaaaagagtttagagcaacagattttgataccttatttaatgagatttatgattttgattgggccgaattattgcctgttgacgctaagtttcctgttcaaggtagagctgtaaaatccaaattgcactctgaaccagatgtacagtcaattgtaaaaaaggcaattgttaataagatggttgaccagtaccatcgtcgtggctttttgccagaaactggtaatgaatatcccttagatattcatatttataaaaatgtagctcgaatttcgctagatactacaggcgctagtttgtttaaacgtggctatcgagtagagcatggtggagcccctatgaaagaaaactttgcggccgggctattaaaactaactccatataatggtactcaccccttaattgatcctatgactggttcaggaactttagctattgaggcagcattaattgctaaaaatatagcaccaggaacctggcgtaaatttgcctttgatggttttgactggtttaaccctaaactacataattaagtattggcaaaggctaagagtgaagttaagccgcttgaagcaccgatttgggctagtgatattgatcagtctgttcttgaagtagctaaattaaatgctcacaatgcaggtgtattgcaagatattcgctttaaacaaatcgcagttaaagactttactactgatctagaaaatggaattataattgcgaacccaccttatggtaagcgattgaaggatcgtgagtcggcagaagagctgtatcgccaaatgggagaagtacttagaccgcttagttcgttcagtcagtattacttaactgcagatcctaactttgaaaaatgttttggtgcaaaggctactaagaagcgcaaactatttaacggaaatttgcgggttgatttctatcagtattgggctaacagaaggtaagaaatgattacaaaagagcttaacacagaattttgggtgatctcagatacgcacctaatcgcagatagtttacatgatgaaggacaagccttttcacgcatgcaaaaaactagtcaaggtaaggatttgtattatcaagaaatagccctttctgcttttatgcgaatggcacaaagaaaaaagcctgccgcaattattgtaactggtgatgtgacatttaacggtgaacgagtttctgctgagaaatttgctcaaatttttaagccgttgaaagaaactaaagtgttagttttacctggaaatcacgacatttttgatgggtgggctagagaatttcgtggtaaaaaacagttctatgctggtgaaattagcccaatgttttggcgctcgatctttgataaatcatatcgtgaggccttagatgaagacgataattcattggcttacagtgtccaactgaatccgcaatatcttttagttttagcggattcaaatatttatggaaaagaagagacaacagaagcaccgcacactcacggcgaaattggaaaagtacaattaaaatggattgaaaaacaatttcgttatgcgcaggaacatcagttacgtccggttttatttatgcatcataatttatatgcacataatccagcagttaacaagggctatgtagttgatgacgctgttgagctacgacgtttgtgtgcgcgttacaacgtgaaattagctttttctggtcatattcatgctcaaaatattatgggaccacaagacatgacgcctacaactgagatcgttacatcaagtttttgttctaatgatcaaggctatggagtagtgcgagttcattcacggcacattacatatgtgcggcgtaattttgatatgacaagatatttaacggatgaggaaaaggaaaattatactttagttcattatcataagtatttaaaagatctacagcttggtagtatttctgcggatatgatgcaaagtgaattaaatcagtatcacgaagacatcgagttagttagggcgatggggaatttgtttggctggatgaactatcatttctttaatggtcataatcatataaaggctagcgagttgaataaaatccatgcttctaaagaatatcaagttttgattaagcaccatcctgagtatcggttatatctaaagacgctgtacgacacaagtgatcactctaatttacaagtgaagatacgatactaaacaaattttagtataatggatactgattctaaagaaagcggacatgattatgttaaaagatgaaacaaaatttgatcaattagggcaaaagctttttatgaaaggtgttttgcaagacttcgaaaagaaaaatggtccaattaagggcagaatgatggttacagaaggaaagattccgccggaaatgttaactaagctgcaatctgaattgatgaatagtagtaattggattgtagttgaaggtagttttgatttttataattatactgtcggcatgattgtagatttgactacaggtaagccattagcaaatggatggttggtaccacaattgggtcacccagggatgcaacctgcagagaaatggcaagaatttttgattgaaaaagtcgttgatgcaatcgatgaaaaaggtaagattaatttgccgctatatgtttggatttcagatcgtagtgatttgaccaagacggatcaagatttataaaaatatttttaattatgtaaagcttaatagagtagagggagttttataactcgcccctctcattgcaccggacgtacggttccgtatccggcgctacgtttgtgattatttacgagataaataatattctagcggatcgaccaagcctgggcgatccgctttgcttatgcccaatacttttgggctaagcagaaagttaatgacataacccgtacttcttttataccaacctaagcgcgtattagctactttatgaatatcttcatcactaaaattgcactttagtgccttgttaatccgcattaagttaatgtatattcgttttggtagtttccattgtttaatgattaccacccgtactttatgacgcagccattgactgaacttaattagaaaatatttcatgtcgccaactctaaagtaattgacccagcctctaactacttgatttatcttagtaaagactagtgatagaggctgagcagctgcttttctgcgacagagaagttctctcatcttgtcataaagcttgattttgcggtcatctcctggctttgcttgccagtattcgccacttttccagaaggtaaagccaagaaagttgctcttggttggtcgtacaactttggttttggttgcgttgacctttaggaatagctttctttctagccatgatgaaattgaattcatcacacgtttggctgatttaccgcttttgacaaagatattgcagtcatcggcatagcggacaaagcgcaggcctctttgttccaattctttatccattttatctaaatagatattggatagaattggtgaaagagggccgccttgtggtacacctagtttattaggcttaacccaaccatcttccattactccagctttaagaaaggctcgaattaaatggagggtggttttgtcatttacttgctctctaattattgaaattaatttatcatgatttaccgtgtcaaagtatttctcaatatccaggtcaacaacccattgatagccttcgtttaaatattccaagacttgttcaatagcgtcatgagcactgcgtccaggtctaaagccatagctatgctcactaaaatgaggatcatagatcttcattaatacttgggcaatagcctgctggattactcggtcaacaaccgtgggtattcctaaaggacgtttcttaccattagctttaggaatgtagactctgcgaacagcttgcggacgatacttcatcttcatgatggcgtcctttatttctacttgatgctttttaaaatagctatcaagctcatcaactgttctcctgtctacaccaggcgctcccttattgattttgactctcctgattgcttccttgagattattttgacttaaaatctgttcaattagttccatctcgtgatatctccatttctacttgtaaatttattcagaattgtcccaattgctttcaccatcaaagagttacgttctctttgtgctaggctatcctcttatccggactgtctgaacattgcttatagcgagatatgctcttacaaacattaggcccttcgctccagtttcattacaaaaccttcagcactactacgacctcagctgacttctcgcgattaacctttttcgaccaggcttacgatcgctgatattaaagcttactcggtttcacctgtccacgagatctctcggggtaagacattcatctttaattttccactgccccctggtttaccgtcttggttttacggttgtcctttggactttaacttgtgctgcagtctcatccaccatttggcctgaccaggtttctgtacgtaggctcggaaaactcgctagccacttccttcacccatagcgtcaccgctaacggcttgtggttcgctacacttggcgacaactacccgtgatctagactttcactagactagacaaatgccatgcccgacacacaacaaaaaggtaggtcaattttgacctaccttttttaggatttatttattagtattaagaagttattgaattaagtaagtagatattatttaaccagtttaattttcaaagtgagctagttattaattgcctgagcagatttttgagcatcccaccaatcgggtaaatcacacaataacttatttaatgtattattgcggtgcgaaattgagtttctctcattgagattcatttctgcaaaggtttttcctagttctggaactacgaataaagcatcgtaaccatagttactgctaccatgtggatacttagcaattaatccactgattctaccagcactaacaatatcattgctttcttgacctggccaagtaaagacaaaggtagtgtagtagctagctgtccttttttcactagaaactccacctaaatagcctaataatttagctttatcatcttgaccattatggtggtaaggcaagattcctaaagagttaagtagataatcaacacttagacctgagctttctgataatgtaggcaaattggtaaattcagctaaacgatgtgctgtagctctagcattacttaaaaatgttgcctcagaatatgacttttgtggtgcataatctacttcagctaaaccaactactttgataggaagactaagctggttaagtttatcttgtaattcattaattttattttggtcatatgttgtaaataataaactatccattattttccccatgctttcaaaaatagatataccatttatattgtatccgctttcatatactgcacagtcattgtcttatctttgtgaagtaaagtcaagcatagataatagcttttatcaaaaagtccatatacttcaggtttttaaactgaataatgttatttttaatgactaagattgtgaaaattatagaaactgtcaaatcttttgtgtaaatagatctttctcgtaaattgattttttaattatttatttaatcaaagtaggattctaaggtgtcctgaacctgaccaaagcctttatgaattcgattgaaataacggtcattgtagctcattgcctgaatgccaataaaagcatcaagcgactgttcagttggaaactctgccttaggcttagctttgcgcttgatcacattgttaaatgattcaatcatgttagtcgaataaattgaagctctgatctgcttgggatagttataaaagaccagcagatctggttctatgtctttcaagcttctgataacatggctgtaaaccttgccccatttggtatagaagtcatgcaggacagctgtggcttcttctttgtttgtctgttgatgcacctgtttgaattcgttcatgatcttttcacgatcgtcgacgcgtactttagcgcagatattgcgcatgacatgaaccaaacagcgttgaaaatgagctttaggataagtcctggccaaggctgttttcatgccaacaacaccatcagaaagaaaaagctcaacttgctttaagcctcgggatttcatgttttgaagcatatctgtccagacttcaatgttctcgctaggcgcaatgcagtagtcaatgacctccttgtgcccattaggcttgatgccaatggcaatatagactgcttcacgctcaaatgtttctcggcgcaaaggaaggtatgtcgcatccaaatagacgcagaaaaacttgtcgcttagcttgcgtttgtggtaagcctcaacctttggaatcatctgcttggaaatatttgatacctgagctggactgtaatggctgccatacatcttttcaattagatcggctatttccctggtggtcacgcccttggagtaaagcttgataatcatgctttccaagatatccgagtgctgcttgtagtcaggcagcgtgtgctgatgaaattgaccgttgcgatcccgaggcacttgcacttcaattgggccaaattgcgtatcaactttgcggaaataagcaccatttctagagttgccagtattccagccatttctggcatagggatcatagcccagaaaggcggtcaattcagcttctaacaagttattaacagcctgttgtagctctttgcgcaataaatcatttattttgtctggattgaatagagcttgagcaaaatctttggtaaaatcattcatgaaggagttcttctttctgtatgtgtttttttgttcaaaccaatcatacgagaaaggaactcctttttctaatgtttaaagaaataaatttaaggaatcattcatccttacacaaactattttacagtctcaaattataatatgaattcatttcaatttatattacttttatatttataacaatcttgtataaccttttgatatataatttctctgaggttgtttttttatatgaaaaaacgaaatacatttatcacactaaacttgtatcaaattacacaagatagagtgattaatcaattaataaaaaaataaaattgtattttaataaaaaagagaaaatcttttttagattttctcaattatgattaactagctattaaaaatttccataatgcattattggtgtaccagttttgcggttgaattgctcctagacaggctacaataatataaattgctaatgttgagattatgaatgcaatgcctaagttgacaatgttgaatggaaaggtagttttatgttgtttcattgcgatgtgaatggcgaaagccaacagaaccaaacctataataattccaaattgataataaatgctcattttctctcctaagttacagttaaaagtatacgttaaaatcggattaaagagtgatttttatttatctagcctctttattttatcaaaatcaatgttatattagagaggtagaaagaagattatgtacatatgtctgtagatatttacaatgaaaaacttgaaccatacgacgatggtaagcgtcataaatttagtggtacttttgatagattaaacgatcgcttagctatttttaaggatttgcgtattgcaggtgctggtggcaatccaattgttaagcagttagcactgcattacttgaaaactttcaaagaccttgatttgaagaggggcgatgtagttgaatttgaaggcatggttgaaaaagattctaacaatggcttcacaattgaacgcccaactcaagcagaaaaaatcagatcagcagctgccgatgatgctaaagttgacgtggttggcgatgattggaattggtttgaaaattagttaacggaagtgacttacgagatgtaagccgcttttatttttgaaatttaagtcatagctagaaatgtagtaaaattaagcttgtaaggagaattagatgcactttgatatctttaatcgaaaaactgtctcaactgataaaatgtttttccagacaacattaaatcctaagcaagcaataatcattggcaatggtgctaaatttcgacgttgggttttcttttctactaattttgctacattttatgtaatcattctgtcagctattagtattttattaattaagtctaatgtttctgtactaatttgcttactattagcattagcaaatttagtaattaatcgctcaatacctcgttattggcaaactttctttggcccgaatgctgaatatggaaaaaatcatcgtccagctattttgcctattttatatatcataaccttgttcggttggctttggagcgtatcacatttcgtaggatctttaacttttattactggtacatttgtgctagtaggtcttgcaggtagtttgttatcgctctggatatggatgaatttgaatactgttagttgtgctccaatcagtgaattacaatggcgaaacaatgccaaacgcaggggaatgtctgatgaagacattgataaggttattgctagtttaaaaaagcgtagagcaatatattttagtaaacacgataaataaaattatagacgaaagatagaatttaatgacagattttacagaatttgaaagtacaattttttcatcagacgataattttgccattcgaaaaattaaacataatgtcattttgacgtattgcactcaagatggtgaaaaagaatatgaaagcctaagtaagaatacatatcgtgtattttttgaaaataatcttgaagttagtcgactgtatccacctgatgaattcagtcacaattggctaatccaaattttaatgccgcaactttcaattgattcgctcaaatctatggcgattgccttaactacattagaaagaattgcgcaaagtcaagaaggcatgcaattatctgaatatgttaaaaatagtgagttagtagaaataaagtcctggtttgatctgcgtaataagttgcgaaaaatatccaaagcttatagcctaattaagcaaagtactgatcaaacaacacagtggctaggaagtgatggacatcgttatcgtgaagtgattttagccaatagtttacggcttaattatggtcaagatgaagttgttcgtttaattccaattaaaaataattgggttattcagtttgttaaaactgatttcagtgcaactgatggcgtaattgatcagctttttgcggcattaacattattgactcaatatgtaaaacaaatttaaatcagagatgaaacatattctttatgcccttaatgggacttttttaatgttactcgttccggctttatttgtattagcattacgacaattaagccatgaagctaaccaaaaattggtaaatacatttggttttaatagtcaaattattgttggcggattaggaattattgttcatgaacttagtcatttgattatggctataatttttggtcatcatattaatgcggttagtttattgcgcatccctagtaataccaatgatatgtcacttggctatgttaaacatacttggtctcctacatctacttatcaaaaggtgggtaatgcttttattggcattgcacctgtattaggatgcaccttgctgatttacataatcatgcgtacattgaatacacctatttcattggttcagaatcagcttactactcagttattaagtaatggtaatgcacttaactggaatttcttaactcatagttggatttatatttttgaattatttcagcttaattttgattcaatatggcactcaattgttgctttattgctagtaatcagtctatgttttggtggattcgatttaagcgaggctgatataagtagtggcaaatatgcttttttaggattaattggtataacctttattatgcttctcttagtttcttttctaggctttcacgctgcattattaccgtttttagttaatattactgtctggatttatttggtattcattatatcaatagtgattttagcaataattaatttaattatgtatattttaaatattattttataaaggagaaaataatggcaaaagcgttattagttatcgactatagtaaagactttgtagctgatgatggagctcttacttgtggccagcctgctcaagcaattgatcaacgtattacagaactgtgtaaacagtttctacaaaataaagattgggtgattttcccgatggacgcgcacttaaaaaatgatccatatcaccctgaaactaaattatatccaccgcataatattattggaactgctggccgtgaagtatatggtcaaacgggtaaatggtatttagaaaacaaagataatgatcatgttttattaatggataaaaatcgttattcagcttttcaaaatactaatctagataattatttacgtgaacgccatattcatgacctgacactaactggtgtttgtactgatatttgtgtattgcacacagcgattgcggcatataatttagactatgaaattacaattccacgttctgctgttgctacttttacatcaaatggcgatgaatgggcaatggctcactttaaaaatgcattaggtgcgaatattgctgattaatttaatggcctgcataatttactagtaagtccaattattactatctaataaaaatatacattataattaatgtaaaggaaaaagctatgtaaagtgaagaggtcaaaatgtatacaaatattcgtaaatttaaaaagggcggaaactacccggaacagcaaaatgggctaccacaagcattttttcataatcccaagtataagaagttaagccccgatgcatgatacctatacatgatacttacgatgagaatgattgattcacaaaccaatggatgggtagatgctgacggtaatatgtatattatttattctaatcaagagctaatggatgacatgcattgcaattcttatacggtgaaacgactaaagaaagaattggttaatcatgatttgttactcgaagaagatgctcctgcagaacatgatgataggttatatcctttaagaattaatgaaaacgaaaaatgataaaagacattggtaaatacggccaatgtcttttatttagtattagtaaagaaaataactaatgtatccgcatcaggataaggctctgaatgaacacttaagaaattttgcagtttatgattgtattcaatattattttcactttgactattttgataaatttgctctagccagctcggttagccggataaatagcattgttcatggcggaacctacagcgttactttgaacgtcatttagtaaatatgatgtcccaatttgattaatttgattgagtaaatgatctatgcgttctatttcctgcttcttatcatgtacgtttggcacaagcagtagagagacggctgtaatatccatttcacattgtgcccaaaatttatcataaagcttgctaaagttttgatctgattgagctaaaagccattcctggtagatttttaaaatacgaattgttttttgaatatcatataaataaagcttacgataactaaactgctgaaattttcttgtaattccagaaagtagttctgtatagcaatctaagtcttcagcaattttaattgccgagtcatttttatttcctttctgtattttatttacattagctgatacttatataagtctatatgataatactgtactttctatacttttattataagatcatcgcatgatttgttaataataaaatgctcactaaaaatgttgtgacaatttattattaacaactaaaaaattatgatagtgtaagtagtaataattatgaaagagcgtgatgtaaatgtctagatggcatagattatttcctgaacgagtttttgatcgtggagaaatatattatggcaatgatatggttgaaaatattcaattagctcaagatcaggaacactttaccgctcaagttcaaggcggaatgggtcgttcttatactgtaactggtcgtcttcgtttagatggtcgagcttcagagttagactgtaattgtccatgggctaataaagggcatcgctgtaaacacgaggttgcggctttacttgcagtagaaaacgaacaagaaaatgaacataacgttaaagtcccttttgctgacttaatttctgaacatcttaagcaaatgattgcacataaaagcccagtacttaaccccttaaatttgattggcaatatgaaatttaccaaaaaaagttatgatcaggcactggaacttaatgatcactggtcgattagtagttgtcggcattttgatgataagatgcgtaaatatgaatatttttgggagatagtaacagaggacaatgagttaattacattatctgtgcaatttactcgctggcaaattatatcaattaaatttgatagtgatttttcccgtattgaaaaagatagtgttagaatattagctctgttttactttattaatgagtatcttgatgacgatccatttgatttaactaaccaggccgctgaagatctacttgaattttatagtgacgcttctacccaaaatgatgagccgattattttgcgggcaagtattgataagtataataacatccctagtttgacgtttaaattaggaaagaacaagcatctttataaagttaaagatcttaatcaactagtagatgcatcccgacacagctcttctctaaagctaggtaagtttttcaacgagcctataaatcaggctaaaatggatattgatagtcaacactggttatcttttattgaaaaaattatagatgctcgtaatctaaacgaagaattttattataattacagtagtcaggttggtcgcattacactagagaactctgtggccgatgaagttaatgatttactttatcaaggcgtaaagttgtactcaaatgagcagcctataggatatacaactgatcaactagatttaaacattaaaattgaaactcaaaagtcatctgctttagttagtgtagaggatcttccagtttctactataattactgggagtcatgcgtattatggctattacaaagatgtatggatcaaatatataggtcttacgcctgcttctttgcataatttaggattgcagcctggtgctgaaatgcaatttagtaaaaagaccgttgctaagtttgcacataatattttgcctaaatttgagcaaacaaagtttatattagtgtctggtactgatgaattgaaagctattttgccaccagaggcccattttttgtttaaattagattatcgtgtaggcagtattttatgtgtggctcgagtacagtatggggatgcacaatacgagttaaatcaaggatatactgaagaggaccgacgcgatgttgaaaaagagaccgcagcatggaagcacattaatacatattttagtgattatcagcatgggcggtatgttttatccaatgaagactcggatgtcgtacaagcttttctagatgatggtatcaatgagttgaaacgattaggcgaagtacaaattacagctaactttagatcacttttaaagggaataaagattaatttggatgttggagtaggtatcaacctgactaatgaattattagatatcgatcttgctgatcaaaagatgagctgggaagacattcaagcggctttgaaagcctaccaagaaaagcaaaaatattttgttttaaaaaatggaatgctagctaaggcagaacaaccgacaattgaacaattggcacaaactttgcatgatttaggtattagttttaaggatttcattcacggtaaattacatttaccagcatatcgtgccttttattttgctaagcaaatgaaagctgctaatgcactgcatttctcaactaatgaatcctttaatactctgattaatgatttagctaagaatcagttgaagcaaaatcaaataccagttagtttgcaaaatattttgcgtccatatcagaagataggttttaattggctaagcactatcgttaattataaatttggcgggctacttgctgatgagatgggattaggtaaaaccttgcagattattagtcttcttttagctcgcaaagaaaaaatgcaaaatcagttacctagcttaatcgttgcgcctgcttctgttatctataattggcaggcagaagttaaaaagttcgcacctagccttaatgtggctctattagatggcactaaaaaagaacgagagagattgcttttagatgctaaaaagtataatctgctaatcagttcatatcaatcgcttaatcgagatctagaagcgtaccaaaatctaatttttgatgtagaagtaattgatgaagcacaaaatattaagaatcagcaatcagttaccgccaagacagtcaaagtcattaaagcgcatcataaactggctctaacaggaacaccgattgaaaataaattgagcgagttatggagtatttttgattacttaatgccaggttttttaggtttatatcctgactttaggaaaaagtatgaattaccgattgttaaagagcaagataaagaagcagaagatcaattagctaatatgataataccctttatcttgcggcgtctaaaaaaagatgtgctacgtgacttacctgaaaaagatgaagaaattgtgcctgttaaaatgaataagaaacaagctgatttgtataatatgcagacgcaaaagattatcgctcaattaaatggacagggggatgaagactttaagagatcacgttttcaaattttggctcagattactaaattacgtgaaatttgttgtgatcctcatttgctttatgaaaactatcacggcaagtctaataaattaattgctacaattgagttgattaagaataatctagcaaatggacataaaattttattgttttcacagttcacagctatgctagatattttgcatgaaaaccttgccagattaagactacctttatttactattactggatcaacacctaaaactaagcgtcaagaacaagttcaaaagtttaatcaaatggctcaaccaggggtctttttgatttcattaaaagcaggcggaacaggcattaacttgactggtgctgatgttgtaattcattatgatccttggtggaacttggctgcagaaaaacaggcgacggatcgagctcatagaattggtcaaaagcattctgttaagatttataagatggttacagaagacagtattgaagagagaatcattgctttacagcaaaagaaagcagaattagctgatataattttgcaaaatgatcagattgctgatgcaacaatgagtaaagacgatttaattaagattttgaaataaatagatcattataataaaataaaaatatttgtttgtacttgcgaactattgtttgcaaaagtataatatttaggtaaacaaaaaccaacaagctaaatgcttgctggttttataattttagtttgagttagtatgtttctttttataccaatacactagaccgaatggaaccagattctcttggtgatgttcgattcgaataatattgcttcggtgactccagtaaattaagattacgagcaatccactgataatgctcaaggcaagatcgtggaaaaagaatgaagcaataaagattagaactactgagatcaaactagttaatgaaaccatacttgtaataaataagatagggaagaagattaacgcacagatcaagaaaaaatggacattatatcctagtaaaaatccagcggaagttgctactgccttgcctcctttgaactttaaaaagacaggaaaagcgtggcctaaaattgcagctaagccaaaaatcaagcaaagataatgtggtcctagtttaaaaattattggtaatactgtagcaaaagttcctttgagaaaatctactataaagacaatgattccagcagctggtcctaatactctaaaggtattagtcgttccgatatttccagatccgtatttcctaatatctttatgaaaaaagatattacccactaacacacctgttgggaatgatccaatcaagtatgctaaaataaacaacgatgcaaattttaatgcaaacatatttaacaacactcctattaatctatcgctattttagcaaagattatcttttaaatatatggtgctggttaaattaatgaacaagtggaggaattttagtggcaaaagctaatacttatgatgattcttcaattcaaattttacatggcctagaagccgttcgtaaaagacctggtatgtatattggttcaactgatattcatggtcttaatcaattagtgtatgaaatcgtcgataactctgtcgacgaagccatggctggttttggtaaagaaattgatgtaatcattcattcagataatagtgttactgtaagagactttgggcgtggtatgccgacaggaatgcacaaatcgggtaagcccacaattgaagttattttaactgtattacatgctggtggtaagtttactgaacaaaattataaaacttcaggcgggttgcatggcgtaggttcatccgttgttaatgcactttcaagttatatgaaggttagagtcgttcgcgatggtaaagcttatgaagaagaatttaaagatggtgggcatccggtaggtacattaaagtgtgtaggaaagacaaaagagccaacagggactaccattacgtttaagccagatgagactatcttttcaaccacgaagtataagtatgagacaattcaggagagaattcgtgaatatgcttttctacttaaaggggttaaatttttcttaacagatgagcgtgagccagaacatcatgatgtttttcagtatgatgatggaattaaatcatttgttaagtatttaaacgaaggtaaaggcacaattagtgatgtcttttattttgaaggcaagcaagatggcatggaaattgaattttcaggtcaatatagtgatggatattcagaaaatttagtttcatttgttaacaatgttagaactggtgatggtggtacccatgagtcaggtgctcgtagtggatttacacgtgcatttaacgattatgctaaaaagcagggtctactaggtaaaaaagataaaaatattgatggttctgattatcgtgaagggcttagcgcggttttatctgttaaaatccctgaagaattacttgaatttgaaggacagactaagggtaaattaggtactccacaagcacgttctgctgtagattcacttgtttatgagaaaatgtcttactatttaatggaaaatggtgagctggctcaggaactagttaagaaggctcaaagggctagggatgcacgtgaagctgctaaaaaggcacgtgatgaaagcaggaatggtaaaaagagacgaaaaaaagaagttttgtctggtaaattaacgccagctcaatcgcgaaatcctaaaaagaatgaactattcttggtcgaaggtgattcagctggtggatctgctaagcaaggtagagacagaagatttcaagcaattttgcctcttcgtggtaaagtattaaatactcaaaaggcaaaattgcaggatatctttaaaaacgaagaaattaataccatgatttataccattggtgctggtgtaggaaccgagtttaatgttgatgactctaattatgataaagtcattatcatgactgacgccgacgatgatggtgctcacattcagatcttgctattaacattcttttatcgttatatgcggccgatgattgaacacggaaaagtttatattgctctgccaccgctttatcgcttacaaaaaggtcgaggcaaaaagacgcaagttcaatatgcatggactgatgaagaactagctgatgatgaaaagaaaatgggacgtggctattcgctgcagcgattcaaaggtttaggtgaaatgaacgcggaacagctatgggctactactatggatcctcaatcgagaatgttaatcagagttaaaattgacgatgctgctcttgctgagagacgagttactaccttaatgggtgataaagtagccgcaagaagaaagtggattgaagaaaatgttaaattcagaatgggcgaagacggctcaattctagaatccgaagatgaataaaagaaggttttaaatttaatggccacaaaagaacgaattcgagaaatgccacttgaacaagtaatgggtgaacgttttggacgatattcaaaatatattattcaagaacgtgctttgcctgatattcgagatggcttaaagccagttcagcggcgtatcctttatgcaatgtatcaagatagtaatacttatgataaaccatttaaaaaggctgctaaggctgtcggtaatatcatgggtaactttcaccctcacggtgacagctcaatctatggggctttagtgcacttatcacaagactggaagatgcgcgaaccgttagttgaaatgcatggtaacaatggttcaatggatggtgatggcccagcagctatgcgttatacggaatcccgcttaagcaaaatctctaatatgcttttgcaagatattgataagcaaaccgtaaacatggtgcttaactttgacgatactgagtatgaacctacagtcttacctgcacgctttcctaacttattagttaatggatcaactgggatctcatctggttacgctacagagattccaccacataacttaggtgaagtgattgatgcaacaatttatttattgaaacatcctgatgcttctcttgaagatttgatgaaatatgtaaaaggccctgactttccaactggtgctattgttatggggactaagggaattaaggaagcatataagacaggacgtggtagaattcaagtccgtgccaaaaccactattcaagaaattcgtgggcataggcaagaaattgttgctacggaaattccattcgatgttaacaaagcactattagtaaaaaagatagatgaaatccgtctgaataaagaaattgatggaatcgcagaagttcgtgatgaaactgaccgccatggtttgtcaattgtgattgaattgaaaaaagatgctgatgcgcagaatattttaaattatttatttaaaaatactgacttacaagtatcttataacttcaacatggtcgctattgatcacatgactcctgttcaagttgggctaaaacgaattttagcttcttatttagaacatgaagaagacgttgtaactaaacgtacgaaatttgacttagataaggcagaagctagattagagattattcagggcttgattcatgccatggatattttggatcaagtaattaaaaccatccgcgcttctaaaaataaagccgatgctaagaagaatttaatagctaagtataataaatttactgaaaaacaagctgaagcaattgtttctttacaactttatcgtttaactaatacggatgttaatgaattaattgctgaacaagacaagttaaataaattggccgaaaaataccgtaaattattatcagatcgtgcaactttagaaaaagaaattattaaagagttaaatgcagtcaagaaagaatttgctaatccacgtcgaactcaaatttcagaagaaagtgctaaagttgaaattgatgaaaaagccttagttgctgatgaacaggttagagtactaattagtcgagatggctatttaaagcgttcatctttacgttcatatcagtcaactaatgatgatgacaatggtttaccagatggtgacaaagtagtttatgaaaacacactatctaccctgactaacttgtatttatttaccaataaggggaatgtcatttatcgtccagtacatgaactaattgaaaccaaatggaaagaaacaggacaacacctatcacaagaaattggattagacagtgatgagcaaattattcgcgtctttgtatttgataaattgaatactgattgcaactttattctggctactaatgacggttatatcaaacaattggagttagctaacttacagccgacgagaacttataagtcacgtgcaatgacagctatcaagttaaagggcaaggatagttatgtagttggggtagatttgatcaaatcagataatcataaggaaatcacattatttactcatcgcgcctatgcaattagatatgatgttagcgagataccaacttcaggagctaaagcagtaggtgttaaatctgctaacttgaaagatgacgattatatcgtaaattatgtcctagttgattctaagtatgttgatttaatgcatgttgggctaattactcaacgtggggcatttaagcaattcaaacttaaactagttaataaagtttctagagccaagcgaggggtactagtactgcgggaattgaagaataaaccgcatagaattgttgctctaatgccatatgctcaagatcatttgttacatgtcactacttctagtgaccgtcatgtaaatattaaaactacggattatccattaggcgatcgttattctaacggctcatttgttattgatactactgttgatgggacgcctgtaagtattgaattgggaagacccattagtagtcaaaattaagatttgagtttaactaaaacaatatattaatctttaaaaacagtgttaagacatatgttttgacactgttttgttttggatagataatagcagtgttatgggacatggcttatcgtaaaataatattttaggaaagagataatcgttatgtctaaaagtgatactattttatcggctaaatcattgcgttattttttacaattgattgagacgatgaattatacccaagctgcacaaattttaggtattacccaaccggctttaactcagcaagtaaaaaaattggaacgcgctattggtgctccattatttggacaaatggggaagaagttatacctaaccgaagctggtaaagaaatggaagcagcagcgatagagttgctaaataccattaatggtgttattagtgacattcaagaatatacccagtcagataaaggcaatatttcaattggtattctagagtccgtacatgttgatcttttctaccaatttttacgttacttcaataaaaagtatccagaagtaacttttactgttgattactttgaccgcaaagagctatggcacagacttgattccaatatgattgatatggcgattatgtatatgccagatactactaataaaacaggagctaatttccgtcatcaatacaatcatcgtgatatttgccctgagcatattgttgtactgactcacaaggataatgtggaagcaggagggacatattctgttactcgttttggcaacagaaagtgggttgcatatccggagaattactacttatcaagattaatgcgacttaactttagtaaaaagattgatctcgttactccgtttaaaattgcatctactaaggaaatgatcaaaattgcagaaaatactgatcttgatacttatgtagatcagacttactatgaggcgcataaggatgagattaatttgactcctgtttatattaaaaatatgcctgagtttacgactgcttgtgtttatcgtagaggaaaattagatgttcctaggatgaagaaattactaacggaattacagattttcttagacaataacttggataggaaccataattttagtaaactattaagtgaagaaattaaataaaataattagaaaaagaggcaatttatttaatggaaaaagaatttgtttttggacaccaaaatccagatactgatgcaattggcactgctattgcattttcatatttgcaaaacaagttaggttacaacactgaagccgttgccttgggtgagcctaatgatgaaactgcatatgctcttaaaaaattcggctttaaagcacctcgtgtaattaaagaagctgctccagaagttaaatctgttatgttggttgaccacaatgaaccacaacaaagtgtttcagatattgacaaagttaaggttactcatgttgtggatcaccatagaataatgaattttaataccgctgatccattatattaccgtgcagaacctgtaggctgtacttcaaccattgtttggagaatgttcaatgaatttggcattgaaattccagaaaactacgctggtttaatgctttcagctattatttcagatactttacttcttaaatcaccaactactacagataaggataaaaaggctgtagaagcattggctaagattgctggcgtagattacaaggaatacggcttagcaatgcttaaggctggtactaacatcagtgacaagtcagaagaagaattgattgatttagatgccaagagctttgaattaaatggtcacaacgtccgtgttgcacaaatcaatgttgttgacttacctgaagcgttagaacgtaaggaagcctttttaaaggcaatggatgcttcatctaaggataatggctatgatatgtttatgcttttaattactaacattcttgactcagattcagaagctttagttgttggctctgatgagactaagtcattattcgaaaaagcatttaataagcaacttagtgattcagaagttgaattacctggtgtagtatcacgtaagaagcaggttgttccacctcttactgatgcttttaatgcttaaaagtaatgatgtaaaaaataggaggtagggttaaccgcctcttattttttacctaaaaattaaaactgattttaggagaaaaatattgaaatacccacaattaaatttagaaaatcaacagggaccaacagctgtattgaaaaccaatcaaggtgaaataaaaattcaactttttccagaacaagccccaatgacggttgaaaattttattcgtttagctcaaaaaggctattatgatggtactatttttcaccgcgtaattagcgattttatgattcaaggtggagatcctgaaggaaatgtcactggtggtgaaagcatttgggggcatccatttgaagatgaactttcacgagaactttttaatattcgcggagcattatcgatggctaattcaggccctaacactaatggtagtcaattttttatcgttcaaaacaagaatatgcctaagcgttacataaaacagatggaacccgcaggctatccaaaggaaattattcatgcttataagcaaggcggaactccatggcttgacggtcgtcatacggtctttggacaagtaattacaggcatggatgtagttgataaaattgctaagtcgaaaaaagataaaatggataaaccactagaagatataactattgattcgatccaagtccaaggatcaaagtttgatgactaacaaaaacgtgctgttttttcggaataaacagcacgtttttgttaattattcatttcttttagaagggtgatcaaagacttacatacgcgttcagccttaggttctggtaattttcttaattcgttaataacttttttcatgaaaacgggtgtattgttatcatgaattttttcaggcttgatttttttagcacgataggcattgttaatgatatcgggtgtagtagtattcaaagctttggcaatagaatcaagcttctgaatactaatgttttggtccttagtcctttccacacgtgaaataaaatttacagaaagatcacttagctcagctaaatcttcctgtgttagtttctgttcacgtcttctacgagaaatttcttctcctaaattaatattcacaagcattcgatcctttcaagtaacttatagtctattatagcctatataaaattatgtaaaaaatgaatagactattttaatattctcaacatacacttatattaaataataagaaattatatttgtttataaatgtacatttttagcgtaatcagtgctattaggcactacagtttagaaactgtcaaatcttttgtgtaaatagttctttctcgtaaattgattttttaattatttatttaatcaaagtaggattctaaggtgtcctgaacctgaccaaagcctttatgaattcgattgaaataacggtcattgtagctcattgcctgaatgccaataaaagcatcaagcgactgttcagttggaaactctgccttaggcttagctttgcgcttgatcacattgttaaatgattcaatcatgttagtcgaataaattgaagctctgatctgcttgggatagttataaaagaccagcagatctggttctatgtctttcaagcttctgataacatggctgtaaaccttgcccccatttggtatagaagtcatgcaggacagctgtggcttcttctttgtttgtctgttgatgcacctgtttgaattcgttcatgatcttttcacgatcgtcgacgcgtactttagcgcagatattgcgcatgacatgaaccaaacagcgttgaaaatgagctttaggataagtcctggccaaggctgttttcatgccaacaacaccatcagaaagaaaaagctcaacttgctttaagcctcgggatttcatgttttgaagcatatctgtccagacttcaatgttctcgctaggcgcaatgcagtagtcaatgacctccttgtgcccattaggcttgatgccaatggcaatatagactgcttcacgctcaaatgtttctcggcgcaaaggaaggtatgtcgcatccaaatagacgcagaaaaacttgtcgcttagcttgcgtttgtggtaagcctcaacctttggaatcatctgcttggaaatatttgatacctgagctggactgtaatggctgccatacatcttttcaattagatcggctatttccctggtggtcacgcccttggagtaaagcttgataatcatgctttccaagatatccgagtgctgcttgtagccaggcagcgtgtgctgatgaaattgaccgttgcgatcccgaggcacttgcacttcaattgggccaaattgcgtatcaactttgcggaaataagcaccatttctagagttgccagtattccagccatttctggcatagggatcatagcccagaaaggcagtcaattcagcttctaacaagttattaacagcctgttgtagctctttgcgcaataaatcatttattttgtctggattgaatagagcttgagcaaaatctttggtaaaatcattcatgaaggagttcttctttctgtatgtgtttttttgttcaaaccaatcatacgagaaaggaactcctttttctaatgtttaaagaaataaatttaaggaatcattcatccttacacaaactattttacagtctcacagtttatagtatagtcttaaattgaatacttttattgttaaaatagaaatgaaataaaagctaaaaaaaatatactaattattaagtttttaagcttataatgtatacaaggatataaaaatagattggggatttgatgagtttaaaagaggttttaaatagtaatcggcctgcagagtcacgacaattagcgtgtgcgttaactttttgtgggggatttattgatgcatatacatatatccagagaggacatacgctttccgctggacaaacaggaaacgttatcttttttagttcagcattagctgatcataatgttcctggaatgattaatcgagctagtacgtttattgctttttctttaggattgctattagtaggactttttcataaatatgtgaaaagtcactattggagagtattttgcttatttccaattttagcgatttgtattgtagtgggctttttgcctaaaagtgttcctaattattatattgtgcctgctattgcgtttggattggctattcaaaacgcatctttcagcaaaattgaaggcatgggttataacaatgcatttacaactggaaatttaaaaaaatcggttgttgcatggagtgcatttttttttggtgaagacaaaagtaaacatacagctgccgttaattatatgatgttaacaattgcatttgcagttggagcaataatttcagctttactgcaaaaattattggtattaaaaactatttggattgcagtcatttttttaacgacgattaatttagtttatatcattgcattgagacgaaataaaaaaattgatttttcaaaatgattttaaaagcacttgtcataattggcaagtgtttttttgaagaggttgtgagtgagaagaaagcgaccaatctgaaaaataataattttataagtgtgcgtataattcatattatgtaaagctgtattaaaaaacaatcaatttaataatagaagtcataattaatttaattgtttcagcaaataagtcttattttgggaaactgtcaaatcttttgtgtaaatagttctttctcgtaaattgattttttaattatttatttaatcaaagtaggattctaaggtgtcctgaacctgaccaaagcctttatgaattcgattgaaataacggtcattgtagctcattgcctgaatgccaataaaagcatcaagcgactgttcagttggaaactctgccttaggcttagctttgcgcttgatcacattgttaaatgattcaatcatgttagtcgaataaattgaagctctgatctgcttgggatagttataaaagaccagcagatctggttctatgtctttcaagcttctgataacatggctgtaaaccttgcccccatttggtatagaagtcatgcaggacagctgtggcttcttctttgtttgtctgttgatgcacctgtttgaattcgttcatgatcttttcacgatcgtcgacgcgtactttagcgcagatattgcgcatgacatgaaccaaacagcgttgaaaatgagctttaggataagtcctggccaaggctgttttcatgccaacaacaccatcagaaagaaaaagctcaacttgctttaagcctcgggatttcatgttttgaagcatatctgtccagacttcaatgttctcgctaggtgcaatgcagtagtcaatgacctccttgtgcccattaggcttgatgccaatggcaatatagactgcttcacgctcaaatgtttctcggcgcaaaggaaggtatgtcgcatccaaatagacgcagaaaaacttgtcgcttagcttgcgtttgtggtaagcctcaacctttggaatcatctgcttggaaatatttgatacctgagctggactgtaatggctgccatacatcttttcaattagatcggctatttccctggtggtcacgcccttggagtaaagcttgataatcatgctttccaagatatccgagtgctgcttgtagtcaggcagcgtgtgctgatgaaattgaccgttgcggtctcgaggcacttgcacttcaattgggccaaattgcgtatcaactttgcggaaataagcaccatttctagagttgccagtattccagccatttctggcatagggatcatagcccagaaaggcagtcaattcagcttctaacaagttattaacagcctgttgtagctctttgcgcaataaatcatttattttgtctggattgaatagagcttgagcaaaatctttggtaaaatcattcatgaaggagttcttctttctgtatgtgtttttttgttcaaaccaatcatacgagaaaggaactcctttttctaatgtttaaagaaataaatttaaggaatcattcatccttacacaaactattttacagtctcaaaattacttttatggctaagagtaaatcaatggtatcctagatattcttgagataattttttagttatctgtatattttatggctaaaagtctgaattgaataatatgctgacaataatcaataaaacaaccttcaaagagaagtattttgaaccagttatggtaaagtaattctaattaaaaacaatgaaaatagttgagtaatatttgctagttttgcctttagtatctataaagtcattttttatttttatgctatagctttctctaaaacaaaaattttaatgatcgctagataaacctatctcgcaaaagcctaatttttgtaaatttgtgcttttgttatttttattgttttaacgttttgtatttcattttaaattcgtaaaaaaatattttataaattctttgctctttttgctacatacaaatcggtattaagtgcttttatatttattcttattccctatttttaagatttgctgcaataatacacatattgaaatttcttaaataaataatcaagcggtaaaaatgataattctactaaactcatgactcaagtcgctacttaaatctgtgtttttacatgaataagacatctaaataaagtttcaatcttcaaaaaatgctgagaatcactctaagatttctttttaatgaattaatttatcgtggttactcaatctttatacaaacaagcaacattttaattcattattataacccttatacctctatctcccctcctctgctgaccagggaagacgaaaaaagagccgaaatcagacataattcgtccaatcaggctctttgcttatctagctagaataaaaatctgtataaaatcaatctgttgcaggtctaattttattcataatgaaggcaacgacgattaccaagataactgcacctaaaattgacggtacaattgccatgtccgcaaccttcggtccccattcccctaaaagggcttggcctagtgaagatccaaccaatcctgctaaaatattagcaatccagttcattgacttaccatgtccagttaaagcacctgcaattaagccgattactccaccaacaattaatacccaaatccaatgtagcattttgatcacctttgctttcttgcaaaatatcttatcacatttctgattaaacaaagcgctttctttaactatctttattttaagcgaatgaactatttcttgtcacttttaaaatatattatttgactgtcttatacttttctttagatttagggcatatttcttgccacgactaattctttattttttgtctattgtatatctcaatttgatttcaatttttttcggtttgattactgatatattaataaatgatctcatctattgccttttgagaactatatctgtagtctataaagtataaattatgtgagagatatagataagattctctccactaagtatggaggacataaattgtttaaaaggaaatcaattattaaattagcatgtgcaactatgttaacgaatgcaggtgtcacacttttatctcaaatgactcgtttctctgactcagagagcattgtgcaagcttcatcaacatcagttgttgctaaagcccttggaattgatgttgccagctaccaaagcgcagatttaactgctcatgccaaggctggttctcaatttgcaatcgttaaagttagtgagggaaccagttatcgcaaccctaaggcagccaatcagattaaatctgctattgctaatgatatgatgccgatggcttatcattttgcaacttttagttcaagttcatcggccgctaagcgcgaagcgcaatacgcaatttcttctgctaaggcgttgggattaccagctggctcatacttagcctgcgattatgaaactggtcagggcaatatcattactaatggtaaaaatgtgacagctaaggctattattgcctttatggatcaaattaaggcggctggctatcaaccacttctctatgctagttcttccgttttgcaaaacaatattaatactccatctatcgtgaacaagtatcctaattcactctgggtagccgcatatgcgatttcaggccgagtagaccaacccaactttaaatacttcccttcaatggatggtgtcgcaatctggcagttcacagataattggcgcggaatgaatactgatggcaatattacagtcttgccattatcaatcgcaggtaacgcggcagtctcacaggctcctaaggcttccaataccaagaaaacagctacagttatgtacaagtcatatgtttatgacaaaaatagcaaccggacaaatgatttttataatgcttacagctctattacttattatgacaataaggtgagaattaaaggcaaatcaatgattcgtgtcggtgaagacaagtatgtgatggcaagtaacgtactaggtaattcacgcgtctttaaagctgatgctaaagtgtataaaaatgatggcaccattaatacaaaatggtctactaaaaaatccggttcaccgatcaagacttatggccctaaacattacatcaataatgaagcttactatcgaattggtaaaaatgcttacgttaaagcagacaagttctaatttatttttagcagcaaatatttgctgcttttttgatgcatccctaaaacgtaaatgaactgacaaatcatttccaatttatttatctgcatcccttttttatccatgttaaaattaaggcattatatagaaacgaggataagataaggatgaaatttaaaaagaagttagctttattcttaggtctgggagtattattgctttctctgactggttgtagtgattttcaaaactgggaattatctatgcgctctaagattggggcattgcccttaacagtatcaacgtatgattctaatggacaaaagatcgaccagatcaaagctaagtcagttaatattcatactgataaaaagatgtcacagaaaagtagtaatggcactgaacattctagcgtaattgatgttgactatggcaataatcgaatgattcacgttggttctactatgattgcctatgaaggactgaaaaactacgaggatgcatttaacaaaaaagttaagatcgacgatcaaaatcgttctgttcctctgttaaatacaatgtatcagaattttaaaaacgattggaatggtagctcaagagtagtaatgattagaagccaattaggaatgccgattgctgtctttattggaaatcacgtctcaattcataagagtgatatgaagaatgcaactcaatttgtgattgatggtcatcgtctatttgtttaccgtgctgattacacagtttatccaatgtccagtttaaaaagcaattaactataaaaagtgtcaatcctcattttaaggactgacactttttattatttatcatcaattaatgcattaaatgcttcattagtttcaacgatgtcgctcattacttgattaatccagtcattaagcttatcgttatcgtagttttctaaaccgccttcggaatctccaatgtccgcaataccattattgaaatctactagttcagtaattaacttttgagcaaaaatcttagtggtaccaccaaagttttccgcaaaattatttacatccccatatgcatcggcaatatcactgaaaactgtgacagttttaccaaaagtctcactcaagttatctacatctgcttgagttggtacagtcaattcttcatcttcattattaagttgttcatctaaacgaacgccaatgtcgtttaacactaagtgaccatcatatagacgattcagtaatttgataccactagggtttttagcttggaagtttacactaatttcttctgtcatactttttcctcatctcacataatgtattttcatctattgtacaatttttagccaaaaaatacgactaaacaaggaaaataagcttttttcgattctttataaaaaatgttatattttacttgaacattagcaataaagagcataaaataaacgattgaaaagtgttgtaccatacaaacaacatatgtttgtaagtaatgtttgaattactaaatgtaatttgcccttacttactgacgagcaatcactgttgctataattagaatgctaagagttttctataagcgttgctggtattctagttatagtgacatgattatctaagttaaatttagttgcaatcatttttctacgttagtactatagatattcacgttcgaatgagcgcagtaattttaaattagactgttttttatcacctattcctgagaataggtgatttttttatgattaacgtatttgtatgatataatataaacattagttcgcgaaaggagcagatatggaaactgctaaatacctagaattgatccaaattgaagtaaataaattgcctgattttgttaagcaatttaatcttggtactaatcattcattaactactacttaccagtacttaactgaaattcgacgcttcttcgattggctacgtcaagaaaatatctcttctgcttcagataatgctcatgttactacggatacattagccaacttacgtcgcaatgacataatgctgtatattgattatttaggacatacccgtaataagcaaggccgactaaactcccccactacgattaatcgctcaattaatgctttacgctccctatttaagtttttaaccattactgccgacaataatcatggtgagccatattttgaacggaatgtaatgcttaaaattaattctttaaatgatacgcaaacacttaattatcgggctcatgtacttgaaagccacatgtacactggtaagttaaaatttgaatttttgacttttattgatcaggactatattaaccattgtaataagcaagcaaagattggttttaagcaaaacaaagaacgtgacatggcaattgctgcattaatcttaggtaccggcattcgggtgtctgaatgtgctggcgttgatttgagtgatttaaaccttaaggatgctgtactagatgtaactagaaaaggcggacaaaaagatagtgtaccaattgcagaatggacacttccttatatcaagcgatataaaggtattcgtaatgaacgctatcatgcagatagtaagcaagtggcattctttttaactcaatggcatggtcaaacgcggcgaattacaactaatgcaattgaaaaaatgatcaataagtattctgcagcttttggtcatccccttaccccacataagttacgtcatacggttgcttctgagctctatgaagtaactaaagatcaagtgcttgtagcacaacagctaggtcaaaaaggcacttcagccaccgatctatatactcatgttgatcagaaaaaacagcgtgcggctctcaatgagatctcaaaaaaaaatcacgattaatcaaattaaatgcaaaaacgagtttggctattcaattccaaactcgttttttattaatgtttcaatttcttgtaagcttttttggagccacgatctagatcacgattaaacttataatcttgccagtctttaacaaagagtaaatctaagttatatccttttgggtacaagtctttagctagtcgtcttaattgtaaacgtctgagtggtacttctacaaattcttttgtcacaaatatctttgctgcattttgggtaggaagatatttataaaagattccttcttcttttaaattggtagcatatacaatatcacctttatgaaattcttttttaacaaccaggttgcttttgtttttacgctggtgaacgaaacttttttttaaagataaaggtaaattattgcccgctaatatggcttctgcttgatgcaaaacattttctggaatacctgattttttggcgatccatagtgctcgactattaccaatacttcctatctttaacttataagtaggttgcagattttttaagtcaaaatccattgcagctgtgataaaaccatcatgctgcttagcaaaatccttaatagagctgtagtgtgttgtggccatgattaaacagccacgtaaatacaactcttgtagaattccaatagcgagtgcgcttccttcatttggatctgtccctgtccctaattcatctaataatactaaactatggaattgagcatatttggtaatcatggcaatatctttcatttcggctgaaaaagtactcagagaattatctaggtcctggtgatcacctattaaagtaaaaacgtcatccattaatggaatatcacatggtttatcgcttggtaaaaacagacctagttcggtcattaaaatcatcaaaccagtagttttaagcgcgacggttttaccaccagcatttggtcctgtaatcattagaacactattttcttgggttaattctaaggttaacggaacaggattaatgatcaagggatgccgcactgcacgtaaaacaagagaattttcacgattaattttaggcctaatacaattatatttttgtgcaaactttcccctagcaaaaatcatatctagtaaagtgattagttcaatgttacgcttaatatcatccttcacgtcgtatatttttgcagttaaagcacctaagattgctagttctagattacgtatttgtgcctttaaattggttatttgctgatttagacgaacaaccttagcaggttgaaagtagacggtttgtccaccattagaaacagccacaatagtccctgacaattgatttttgtagtttgctttaattggaatggtagcgtagccctctttttcaacgatcattgcgtctctaatcatcttttgattaggtttactagtcaaaaaatgatttaatgcagttttgagttcagtaacagatttctttaagtcgcggcgcatttttgctagttcacgatctgcctcatcgcgtacttgacaatgttcaatagtagtataaatagcatcttcaatgtcttacaatagcgtcatgtcttggacatatgcattgagtaatggtgctagctgctcatgtctggctaaaaagcgttgtagtaggcgatttactcgtaaaaattctgctactttttctagatcatcaggagttaagattagtcctttttcagctttagtaattaaatgctcgatatcctcagaactggcaaaaggaatgtgctgccgtaatttcaaaatcttcacggcttcttctgtttcattaagcagttgttctactttatgtaaattgctacttggttggacggaacttaattgttctttggcagcaatagtaattgcctgttgagctaagatatctttaacttgagtaaagtttaagttttgattattgttgatatttttcaatttgatgtaatttccttatgtttaatttaacgctgattgtaacataaaaagaacattaaaataaatactatagtaaaacagttattaaattaattcctatattttatgataaccatattactatttcctactatagcaattttactataacattcagcactagtatctcaactgtaatttttaattacaaatctattatcgtaaaaagggtaaacaaaaaagaccatagtttgtactatggtctatggctatttgttcttattttaattcgagcttatcaatatcaaccatccatgcaattgcaattgatttctctcctaagtgtgtagcgattactggactaaattcagctacatcaactggcttatctggaaagttttcattaacaaattgcttaatttgctccgcttgctttaaatcatttgagtgaaatacaaacaagcgtagcttatctttataaggcaaatttgctgtcttctctaaagttaatttttctaccttagaaacagcacgctttaatgatctgatcttatcaaaagcaacgatttttccttcatcattaaaagttaacaaaggcttgatttgaagcattgtcccaataaaagcaccggcattgcttaaacgaccaccacgacttaagtttttaagatcatctactacaaagaattcatcaattgtcttacgtatctcatctaacttctttaagatagcctctggttccataccattttttatcattcttgcggcagctaacaccaagtagccttgcaatctaactgtcatcttagaatcgtatggatataaattatattcaggattgttatgtgccatatttaccatattttgataaaagcctgagataccactggacaaagtgatagcgataatagcttcatagccttctccgtgtaatttattacataattctatcatttgccccatgctgggctgtgaagttttaggaaaagcagcaccttgtctctccatctcaaaaagctgggtggaagtgatattaacgccttctgaatattccttatcacctacgatgacaggaataggaactacattaatatcattatttttaacttcttgatcagttaagacactagtactgtcagtaactaatgcaattttcaatttattaacccttcccatatctaatttagcatagaaaaattatagcataaaaggcacctatcacgcaccctattccattttttctagggtcatagaagtatcagcgacttgatttaattgcttaataaataaattagcagcatctctgtcaaaatagacaaataataaattctcaatcttagtcagagttttttttagttctttagctttagtcacgccagcttcacttagattcacaatcttgcttgaatctttttccgatctagtgatattaataaagctcatagtcttcttttgctgcaattgacgacttaaggttgataatgaaatattaagcgcttctgccagcttccccatcgctaatgcttgatttttgttttcatcaaaaaatagcaaaattcgagtttgtgaaatatttaagccgcatttgtgatttatttcttttttcacttgatctgcgatcgtactaaaaaataatacatccattcgtatagtcctttttctccaatgtagattactatatacttgtattttatcatttaatatggcatttgataataccaaaaggctaatttatcagtaatattgtataatacaatgcactttttatgttgtaatatacaactgaatgatatagcagaccttgcgtgaaacatttactactgtattgcaggtttcaattatgattagctataacttataaatataatcattttagaatctgactaaaaattgatataatattacacgaactttgaggtgatatttatggcatttgatggattatttatccatagtttattaaaagacttagtccctactctggtaggtggtcgcttatcaaaaatttatcaaccatttgatcaagacctagtcttaatttttagaaaagatagaaagaattatcaatttttaatttcggccaatgcacaatatccaagaatgtatttgactaaacaaaacattgcaaatcctgataaagcacctatttttgtcatggttttaagaaaatacttagaaggttcagttttgcaatcgattgagcaagttggcttaggtcgaattgtcaactttcattttagtaatcgaaatgaacttggtgatcaagtcaagctcatgctttctgtagaattaatgggacgtcatagtaatgtcatcctttataatcaagaagacaatcacattattgatttacttaagcgaattaatcctgatgaaaatagagcgcgtgttttactgccaaaagcaaaatatgagttgcccccactaaaaccaggattaaatgggttgactctatcagaaagtgaatttaaacaattaagtagtgaaaaccagcctaatgaaattgctcaaaaaatggatggcttagataaagatgatcgaactgaattattaggctatcttgaagacgattacacttattcatcttttaagaccttttttaatcagtttgacaatccgcgtgcttttattttaaaaacacctagaaataagcgtaagattttttgttatttgccctatcatttagatttagagaaagaaagctctaatccagatctgaatgctggcttagatgaattttatgaatatcaggcaacacgtgattgggttaagcagcgtgcaggacaagttgaacgtgtagttaagaatgagcaaaataaactaactaagaaagttaaaaaacttgagaagcaattagatcttgctgaaaattcagagggctatagaattaaaggcgaaattttaaatgcaaatttggctcaagtaaaacctggaatgactaaagtttcattacctaactattacgaaaataatgctccattagagattaaattagatcctgctctctcccctgctcgtaatgcgcaaaagtattttactcgttacaaaaagttacgtgattctattaagcacattaatgaacagcttcgtattgctaaggatgatattcgttactttgattcaattcaaacagctattgacaatgcggatccacaggatattgatcaaattacagatgaattgattaatcaaggatatttacgtaaacaaaagaaaaataagcgtaggaagaaaatcattgaacgcaatttaaatgaatttaaactttcatctggtaaacacgtattggttggtaaaaacaactatcaaaacgattggcttactcttaaaaaagctaataaatctgattactggtttcatgttaagaatatgccaggctcacatgtgatcttacgcgatgatcagcctactgatcaagatattaaagaagcggctgagattgcagcttacttttctaaggctaaaaattccgctcacgtacaagttgattatgtgcaagacaagcgtgtgaaaaagcctaatggtgctaaaccaggatttgtaatctacactggacaaaattcaattgaagtaactcctgaagaaaaggaaattatgaataaaaaaattgaaaaataaaaatcatcgaactagttagttcaatgattctcataaatgcaaagtcatatcgactttgcattttgttttgcttattaaataggttgagtagttaaagccaatgattctagaacgtctaaaatcaattccgctgtttcgatacttgagaaaacaggaatatgtgtattcagcgcttcatctctgatgcgcgatgcatcttcgctagctgcatcagacaaattagtaatattaacaaccatgacgatcttatgttgacgaattttatctagtagatttctagggtctttatgaaccttctccactactccagtagtaatcccagcttccgcaaacatattagctgttccttcggtcgcaattaatttgaaacccaagcgatcaaatcggcgagctagttgggtcacgcgattcttgtcttcatctctgactgaaataaagattgttccataacttggaatatgtaaatcacttgcttcatatcctttgtataaagccttagctagttgagtatctcgacccattacagaacctgaggatttcatatttgaatcgaaagtattaccacttgaataattaagaaatgaaaatactggcattttaatatgaataaaatcgctgttttgccatagaccattaggatatcctagctctgctaaatttttgccaattaaagcttctgtagcacaagtagtgatatccttatctagtgattttgataaaaatgctacattatgacctgcatatggtttaatttgcaatagatataggtcattatcaacgaataaatagtgcagattaaaaataccttttgttttcagctgcttaattaatttaattgactcttgctcaatctttttttgctgctcttcggttaaattttgcggctgaatcactgcaattgaatcagaggcatgcgaacctgtttgctctagatgttcaattataccgggcaaagttacattggtaccatcagagatagccgttacctcatatttgtgtccctcaataaagcgagaaatagttatttgatcaagttgattttttgctaaatatttctctattgcaggaacatcataaacaactgcagatttttgcttgttttctttattcataccaccaattaaaagtggaaaaccatatttagaagcaaaagcgaaaacctggtctgtatcagttgttttatttaatgccgggacccgctttaaggtagtagattgttgatcaagcaaagtagtaatcttatcccgcggatcgtcgtttgccttttgcccaataacgtgcaaaccacatttttccaactctttactcaatgcactgattcttttgccagaaaattgaactaatacatcagaaatattttctcttttagcaacagttagaatattttcaactgtaatggaatcaaaataaactcggtcaatattcttataccttgatgaaatcgattcgtcattatttgatagaagcacagtaacatagccatacttatgtaaagtatcggccgcgtgagcaatcatatagtcaaactcgctagtaaccgaaacttgaagcggcaacatgcccaaaatcaagatctttttttcagcatttaaagcttgtgcttcattttgaacatcatatgcactgtagtaagcacaaacattaggtttatatatacctgctgagccgtcgatcttcaaatatgatggctgcaagtcaattttattaatcaaagagcgaacttcagtaactgatttttgtaaaatcttagctaataatgggttaaagaatccatagactttagcttcttgcagcaaatcacgcgaaggctgctccttctcttgtaataactttttgccaagtcttacaatgtgaagcaatttctgataataaaccggatgcaaatgtgttactttttgtaattcagaatatggaatatcttgatcaattgcggctaataatttaactaaatgcaattcatcaggatgtgccaaatcattcaaaatatctgcagtggatttttctttttcttttataaaagcatgccaacccaattctaaattaatagttgcatctaagcctttcagaaaagcagtttcaaaattacggcctacacccattgcttctccacttgcttgcatgcgacttcctagcaaatagtggttataaccggattcagcaaatgaccaatatggcattttaattgctactgcatctaaggtgggttcaattgaggcattaagtccagatagaggatcggtaatctcattcagtcgataaccgatagcaactttgctaacgacatatcccacatcatacattccaattccttgagcccaaacagaacttcgcgtcaaacgcggacgaatcgtcaaaagcttagatcgaatttgagttccatggtgtttaatcgcaaaatgaaaactagcaaatccaatgagatcaagattagacatgatttttctaacggttattcttaactcttgaatatgatcattgtttagggttaatgatggcatcacaactgcagagtcacctgaattaatacctacagcttcaatagatcccgcaaaattgataaaagctaaattgccatccttatcacggattacgtcaacaattacttcttcccaactagataagtcttcagtcaagcgataattcttccatgtaaaattatcattttgcttttcttctttaaagtaactgattaaatcggtaggatttgcaaattgcaaatgttcgttgtgtacaaaacggttgtacttagtaactaatacgggaaaagtgactttgtcgttaatgctttctagcgcattatctaaattatcctgaatactctgattaagttcccaagattgcccggtatcaatatgtagcttagtaagcaactctgtctttttctgttgattccccatttgtagagcacgcgaattcaatgttagtaactgaattcccatttgttctaaaacgccatcttgtaataacttatgtgcaacctttaaaccattagttgaaccataagctgtcataattgcatctggctcttccatccgtagaattcttttcaggaagtcgagagtcatcggttcaagatagactgttacaccaagttttttatcagttgaaattgtagctggattaggattgactagcacaacttgaatgccttcttctgtcaaagcatcaattgcttctgttgccataagatccatttctgctacactaccgattaaagtagggcctgatccgataattaaaactttatctaaatcgttttctaatggcatataactaccccatcatctgtaaaaaataatcaaaaatttcatctgcatcattagtgcctggtgctccttcaggattaaaagcagtggcgatcaatttgtccttactgttccagaagcccgccatcagttcactgtgtagatcaaagtattcacgattcatattcatcttcacactatcaggcaacactagttggtcaatattcatcgctgtttgccagatagcattactattttgttcaatcactggataattaataccatcaaattcttgtggtaattgaaccagttcaaagccgagataatcgctcaaagttaaaaaacctaatccgattcctaaaattggatacttaccataaaaatgatctaaaactggcgttagctgattaattacttcttctggttttcctggcccatttgaaataatcattccttcaggacgtaagttttcaatatcaatcggactggcactgtatggtaaaactgtcgtatttacttttcgtaaagataaagcacgcagcattgagtgctttagcccaagatctagcacagctacagttcgtccaacattaggggatgcatatgcattcttagttgaaacagtcgcagatttatttttaggtaaaactagtgctttaatctgatcaaaggcatgctcgtcattagtatccatgatcgaagccttaattgtaccttcttccattaagcgatgaactaaagcacgagtgtcaactttgaaaattgcagggatgttcttttctttcaaaaaagaacttaaatcttcaaaattttcactatctgaaatatttaatgcaatatcgttagcaataatccctttaactacgggatcaatactttcataatcaatggcattaataccgttattaccaatcattggtgaagtaaagactaaaattttaccagcattagtaggatctgttaatgcttcttggtagccaaaattagccgtttgaattgctaattcaccggttgaaataatactggcaccaattccttcacctggaaatgaactgccatcttctaaaatcaaataccgtttcatattatcacttacttgtttgttctagttgagccaacgtttcttgaaaaatttgtggtggttctacactaaactctagccattcgccagtacttggatgtttaaatcctaatactttagcatgcaaaaattgaccatgacctttcaaggttttacgtggaccgtataatgggtctcctgcaaccggatgtccaatatagtcaagatgaactctaatttgatgggttcttccagtttcaagctgacactcaattaagctataatccttgaactgctcaagcaccttgaagtgagtaatagcttttttgcctgtttcaactaccgccattttcttgcggtcatatggattgcgaccaattggtgcatcaattaccccattttcttccgcaaaattaccatgaacaattgcccaataaagacgtttgttagtcttatgagccaattgatcttctaatgattcacgagccttggcggtcttagcgatcattaataaaccagatgtatctttatcaatccggtggacaattccaggacgaaatccttctggtgattgtgctaaggccttggtgtgatataacaacgcatttactaaagtatgatctggatgacctggtgcgggatgcactaccataccttgaggcttgttaactacaatgacatcatcgtcttcatacacgatatcaagtggaatattttcgggtataacatctaacggtttaaccgctggaatattaacttcgattttatctcccgcctgaatcttataagatactttttcgactttgccattaactaggatattttggtctttaaccagttctttaactctagttcgagatagatcaggaatttgttctgaaacaaacttatctaaacgtcccttttcgttttttacttcaagtgaatattctttagtcatgttgttcttccttaccttcaataaaaattaagtaaatgaacacaaggattactccaacagtaattgcggaatccgcaatattaaaaatgttgaagtgaacaaaatcaagctgaagcatatcaactacatattttaaatgcaaacgatcaataaaattaccaacaattccacctaagatgagggctaaacccacatcaaacaaggtattcttgtactttttgttaaaaagaaaatacaagcaaacaccgatggcaataatactgataatgtagaagagccacatttgtccagtcaaaatgttccaggccgcaccattattttgcaaataattaaaggaaagaagcccaggaataatctggtgtacttctcccacagcataatgggcaacaatataattcttaagtccttgatcggcaagaaccacaactaatgaaataattaaatataaaaactgcatatctttttagaataatccgctaattttaccattgttatcaacatcgatatctagggccgcaggatgcttaggcaaacctggcatatctagcacatgacctgtggtaaccacgataaaatgcgcaccattttttaaactaatccctttcacatgaagcttaaagtcagttggagcacccaattcgttcttgttgtcgctaaatgaatattgggtcttggcaataattactggtaattgggctttacctaactttcttaattccgcaatttgcttttcagccttgtcactatattcaactccagctgcatgataaatcttggtagcgactttctcaatcttgtctttaacatcgtcatcatctgcataagttggagttaaatctgccttgccagagttagccaaatcaacaacagcttgagcagcttctacaccacccttagaaccttcgccatgataagtaactacttcagcattaataccttgttcttcaattaattgtttaagcaaagcaagttcttggtcagtatctgaagcaaaacgattgattaacacgatgaccggcacattgtatgaccgcatgttgttcatatgacgctcgaggtttttaaaaccttcttttaaagcatgtaggttttcttcatctaagtgatcagttgagcctaaagcttgatacttcaatgcacgaacagttgctacaactactgcagcatcgggcgccttgtccagatgtcttgagacaaagtccatgaacttttgcccaccaagatcactaccaaagccggcctcagttaatacatagtcgcttaaatgcaaagccaagtttgtcgcaatgacggaattggctccatgcgcgatattagcaaaaggccccccgtgcactaatgctggtgtgtgttccaaggtctgtactaagttaggcttcagcgcattagacaatagtgcagcaattgcaccttggaatcctaactgtttaacataaaccggttcatcatccttagtgtaaccaactagcatgtcaccgattctactctttaaatcgttaatatcagttgccaagcagagaatcgccatcaattcgttggctacagtaatggcaaaactagcttgatgttcaacaccattaaacttggagccttgaccaaccgtgatttttcttaaagcacggtcattaacatcaagcccacgcttaagtaaaattcggtcaggatcaagatttaggctattgtcttggtagatgtagttatcaactaaagctgcaagtgtgtcaattgcggcagttaaagcatgcatatctcctgtgaagtgtaggttgatatcttccatagggatgatttgtgctttcccaccacctgtagcaccgccttttaatccaaaaacaggtcccatcgaaggttcacgcaaggcgatcatcgtattctggtgcaactgattgtgaattgcatcccccaatccaattgtaatcgttgacttaccttccccagcgggagtaggagaaattgacgttactaatactaatttacctaactttttactagcacgagtcctgttaatggcttgccaagtaatcttagccttatcatgaccataaggttctaagtcttcctctttcaagcctaccttagcggctatttcattaataggtaattctttggtttcttgtgcgatttcaatatctgatttcattattgcttattcttctttctagacatcattaaaacagaatagctttggtaatcactttttagttgataaacttgaaaattacgccaacttgaaagcaaagtcatttgattgatttttacttttgaacgatatggcaacttgagtaatattttgtctccacccttttgcaagtaagaaaaggaccaagtataaactgctaaaagtaagaaaatgataccaactactattccaggtatactaattgctttgttcccttcatagcccaaaataaaggcgataaatagaacgattaagagccaagaataatagataattcctgcaactcctagaaacatgaaatgccgtttagattttagaatttagatcacaccctatttatttaatcatgtctattgtatcaaagatttaatcaaaataagagggttgaacttacagcaattaaatataagtccaatcctctatcacatttatttactttactactgctatttcgtctctaacctttatattgcttgaatcgatgccaggtttttgaccgtgaagattaaagtctaaatcaactgtcggttgaaacagtaaatgtactcattgaaagctcagtagccttggtatttttcgctgcttgaccccatgctctcaatactgcttcgggaattcctttagcattagtcaaatttacgttacttaatttattaccaacatggccgaaggaatcaccattatcaccaatattattaccaaagtttacattgcttaggtcaatattggataaattactatcgccatcgaacaaactagcaatcgatttagcattagataaattccaaccactaatatttacagattcaagacttttatcatgaccaaatgttgcataaatattagtaacacgacttgtatcccaaccacttaagttaatactttttacatttggaatactagaaaataaaagtttcagattagttacattggaattcaaagttgtagtagttaaatcaatggcagttgcatttggttctttattgcttgaacgtatccattaactatttctctagtaatgttgcgggcatttgttagatcaacatcagttaaggcattattatgtgcaaaaaagttccaagcgtttaccacatttttgtatacagtatcgcttagatcaactttcacaagcttttcagcgccactaaacatttgtgacacgtcactgaattgacccatattccagccagcgatgtttacattttcaagattcttgtcattttgaaacatagatctaattgcagtggcttcactaacatctaaatgacttagatcagcagactttaaagtgtcactgttcattaaggctgcggtcatgtcacccttagcataaactttgttcttatctccctcactgtcaatagtaatgttaactgcacctgcatctttgatagtttctaataagtctttagtgatatagactttatcatcagtagttattgttcctgcattgataaaatcttgggtattagggatgtaaatatttttattaccagtacccttatatttagttaaagtgtattgatgagaattttgatctaaacttccatcccaatctgcagtgttgtactgactattttgagtggtgttagcttgtgtcttactagttgaagctactgtagtagcttgcttattggtagaagtcgtactctcctgcttgttttcattagtagctatcttgttcttactttcaattgatgatccgacatttgagttatcatcgattgaattgttcttagtagttaaatcagtatttgaaagatcaactttgttagtcgattttgtcttcacaatactagtagtgtcttcagttttattggcaccatttgtatctacattattagaagttttagttgtggaagcaacttgctctgtagtagtttggtcctttataacactggtagtagcactatcagatgaatttgcatcaacactatcagcatgtactgtttgactagagtaactcataaaagtcaatccaattagtacagaaactgcaccgattgttattttacgaattgaaaaacgttgtttaatagaatcaatattattgtttctaaggaaatatcattaataaaaaatgaccgagaaattaatctcagtcatcttcttatcaataagggtatctcatttctactaccctactcgactagtaccattagcataattcaaagttacgccatcttgcacgttgaaaatgtaaatattgaaatgaactgcatttgagttaaccgactgcccttccatttcaactccgcgagccaatagttcattgccacgaaagaccggtgtcacacggtagcggacgtagttgcttcgactttcttttacataatcagcaacctgatcctcatagcgcaacatatcaggatcatttagctgccttgtacctgtcatcaaatttttaatgttgttgttctgtcctgttagctgataaccaatcaaatggcagcgattatagagccagccgccagcaactcgtttattatgccaaccagtaggatcaacatgtagtggttcgcgtctagcgcttggcatcagcgactgaataagcaatgcgtttgcggcagttacccgattcaaaccatcgaggttaccatattcttgccatgctccgcgattagtactcaagtcactcttagaaaaactaggatcgttgttatttactgtaatgatgtttttcccagaatagttaagacttgccagttttgcggcactaacagattcaatattgtgtttgccagtgtacttcttgagttctttgcgcagtttagcaatctttttgtctaggctaacaattttcttttcagtttgcttgttttcctgcgcaatttgcttggtctttttctcagcactgtggtcatatttgatgatagttttaaccttggcgatgacattttgacttagactaggattagtaatcgcaccatagccgccaaacaaaaacaacgtacttgaaacaagtgtaataattttcttcttattcatcacctttttgcctttctgtaaccagcattgattgcatcctgctcactattgaagtaaaccgcatttgcggaattcatatgatagcctgcttgtcctggtacgtgataaatcttagaattgacgttaccgacaattttgccagtttctgctgtatctaggtctccatgattgccgccaccattagaatgatgtgttgcagttgaacgactagattgagctgactcgttttgccgtgattgttttgctatttgagtagcttttttagcagctgcttttgcctgttctttttgctccttctcttgttcttcttttttatccttagcatctttaagttcggagcttagcttatcgtactcatccttcttcttcttttcttcggctaattcaaaagtctgctcttctaagacttcttcatcagtagtgcttttctcttgaaacttcttctggtgctcaatatatgctggttgagaatgtactaattcacgagtgatgtttagaccatatttatttaatagcagtttttcagtatcactaattttataaatacttcttcttggtgagattagtaaaccagctaattttaaatcactaagcgcccaagctactcgactaattgctactaaatcatgatatttagaaggatatcttaaattaacaagttcttcaggtaaattaatctctgtgacaacagcttatcaagctctctacctacccattcttctttagtactcgctacctctagcatgggacctaaaaatgcatcccaagttggcatcccattttcactatgttttaaagttttgtagtcaatcattttttatctttatcaacttaggcgtattactgtaatgtgttcgcccagaagcttttatattaagattgactggttgcatcaaatttacgctagtcaatattgcctctcctgactttaaactcgacaactgagctaatttgtctttatttaggaaattattgattgctttaatttcatattcaccagttaaccgatgcattaaaagtgttcctatctgatttaatactatagttggcacatctttggggctttgagtagttaaaaatagaaatattccattttttcttccttctcgtgctaacgtagccagaggagaaataaaatcatcttgagcatctttttctaaagcatatctgtgaacttcatcaacaaataataaagttggatgttttgtcatatcatgatttaataagaaattacttatatagtctacaattacttgtcctaatccaattgaaaatttggaatcatttaaacgtatatataatgatatgtcattaccttgaaattctaacatttctttattaaggtctttgagtatctttttacctttatctgtttctccaaaatccttatcttgagttttactatctacgtttaaaaataactcttttagattatacgtcttaatcaaatattttactttacgtattagccaagaattagctccatatgtaaaataatcaaactggtaggttccttgttttatacctttattccaactaagttttaaagaatctttctcaatttgtttatctaaattgtttatatcaaatgattcattaaaaactttatcagattcccactgaatctgaagatgcttgtactgttcttgatttgccccttcacagtcaagaatatcatttcttataaatctattctctgcctcggttaaatttaccttatttaaatgctttttatagtattgaacaaattttaatttttttattgcctctaaaagctcaatcacttgggaattatcatttggcctaaataaagaaatccattgttcatcagtcaaattagcagtattcaagaataaatttttccctattgtttttaaattaacctcattttttgaaaatgcatctttatattcaccagttggatctataatcaaaaattttccttttagcttttgatatttatctaaaatcgctaatgcactagttgatttaccagaattcgttgctcctacaatcataaaatggtgattaaataatccatcaacactaattttgaatggaatagctttcttttcatttaaattaaagcttgaaaattcaatttgattatcccttttattaatttctaatgaatttatatatttcttaatagcttcatcattacagatatatgccttatcaccaattcctactgttagatctccgggcaatacaaacgtatttttatcgtacattgccattagtttaatttcaatatttgggtaaataatatcatcattattttctattactgccttatgaatattatcagtattattaatcctagaacttattactttccctaagaaaattggagactgtaaaatagtttgtgtaaggatgaatgattccttaaatttatttctttaaacattagaaaaaggagttcctttctcgtatgattggtttgaacaaaaaaacacatacagaaagaagaactccttcatgaatgattttaccaaagattttgctcaagctctattcaatccagacaaaataaatgatttattgcgcaaagagctacaacaggctgttaataacttgttagaagctgaattgactgcctttctgggctatgatccctatgccagaaatggctgaaatactggcaactctagaaatggtgcttatttccgcaaagttgatacgcaatttggcccaattgaagtgcaagtgcctcgggatcgcaacggtcaatttcatcagcacacgctgcctgactacaagcagcactcggatatcttggaaagcatgattatcaagctttactccaagggcgtgaccaccaggaaaatagccgatctaattgaaaagatgtatggcagccattacagtccagctcaggtatcaaatatttccaagcagatgattccaaaggttgaggcttaccacaaacgcaagctaagcgacaagtttttctgcgtctatttggatgcgacataccttcctttgcgccgagaaacatttgagcgtgaagcagtctatattgccattggcatcaagcctaatgggcacaaggaggtcattgactactgcattgcacctagcgagaacattgaagtctggacagatatgcttcaaaacatgaaatcccgaggcttaaagcaagttgagctttttctttctgatggtgttgttggcatgaaaacagccttggccaggacttatcctaaagctcattttcaacgctgtttggttcatgtcatgcgcaatatctgcgctaaagtacgcgtcgacgatcgtgaaaagatcatgaacgaattcaaacaggtgcatcaacagacaaacaaagaagaagccacagctgtcctgcatgacttctataccaaatggggcaaggtttacagccatgttatcagaagcttgaaagacatagaaccagatctgctggtcttttataactatcccaagcagatcagagcttcaatttattcgactaacatgattgaatcatttaacaatgtgatcaagcgcaaagctaagcctaaggcagagtttccaactgaacagtcgcttgatgcttttattggcattcaggcaatgagctacaatgaccgttatttcaatcgaattcataaaggctttggtcaggttcaggacaccttagaatcctactttgattaaataaataattaaaaaatcaatttacgagaaagaactatttacacaaaagatttgacagtttcgaaaattgtgccattactatcaatcaaaacatgataattaatagtattagggcgtaaaacatcactttgattgaagcgatacttcaataaactcatgttttctatttgaatattagcaaaaatagaagatacagtagatattttacctaaatagtattcacatttgtctacatgcaaatttttgtctgaactatcaaaaaagttatctatcaaactcatagttatcccacataataagataaatcataattataactacacattgttgctttaagaaaagcaatattatatcctcgatctctcaaatcatctaaatcactccagttgtcattaacatcttcttgttctgtttttttatcaaaattatgaatattataatcagtaatcaaacaatctaaacttgagttatgcttaattgcgtttataatcattctacttatgtgattatcaccaaaactaaaacccgaagtaactaataatgtattaggttggtgcaacttattttgaaatcgagacatgagatcaaaatagggttcctcatagctctgagcatatttattagaacttggaaaaatcatttttacatgattactgttatctctaatcgtactttttacctcttccacagtcgatttagtaactttattttctttttcaatccaattaatagacccatgaattttaagaagatctataacatgctttttatagataacttgtttagtattaatattgttaacttctttactcaaaacccactcatacatatcatcattgaattctttattatttccaaattcaaatccatcaaatattgtgaagttatctttttccagagatttttcaattgctaaatcataatttgtagtcgcaaccatcaatttactgctatccgaatgaattaaattaagcaactttaaaatcactttatcatgcttaaatggcattttagatgtactatcgaaattataatcaactgaatcaagtattgatagtaaaataaatctttttaatttttttgcttgtgataaacttggatttctgacttttttaccagacatctctgcgtcttgaatatataaatttaaatttgaaatatattcttctaatggaaaagaaaaccatgtactttcatcatcaaaattaactttttcaaatttttcttgttgatctttaggtaaaaagatcttagcatccttttcatctaaatattcttctaaattatttgttccataaagctgattgaaaatattccatgaaatatcttgcatagtctttccataatttgaattaatatttccattctcattagttacaactgaagctccggcaccaactaatagcacaacattactataatctttacttataaaacgcaaaacagcccttttgagaaacttatgaagttgcttttctaaaaacacaaaatcatgatcattatcatcatctggatttattttatctctataaaatttacttagtgctttctttttatcttgtttattatatttatcaggtaacgataactctatatctatttctttatctctgtacaactgcatacttaatctcctcgtattatataaattcatctcttaaaagttaattctaatatataaacaaattgtcaattttatcaacaattctattctgctccgctaatggtggaagaggtaatttcaaattaattaatttactcaaatatattcctttttgggttgtccctttcgcattagcaaaaatttgagttttaaacattgctgaaattaaaacataataaagaaacttacttaaaatattactactaataaccgcaacacttctttgagctgtaaaaagtttatcagtatcaacaactgcagcattacctaacgagcctacaatagtgagtaatacatctccctttcggatgtttgttcttttatcctcttttaaaaattgatcttcagaaacaaatctatttgataaagaaaaatctatttttccttttttaatgtttattgcagagataacttgttttccttcatgtgaattcggtgggggattatgcgtaccatcagtaatcctttttgcaatattccccaatctaacccattcccaactatcaggaatatcaaacggcttttcctcatcagtgatcggaggcaacggcttgctcttcttgatctccttttccttgatcatcttccgcttctcagccttaatcttctctagcaaaacactagctggttcatcatggggatcttgctcgactaattttccacgcattgccaaatccagcaccttcgacttcagcaaagtctgaagttttgcgtattgttgagtagaagattcgactttgcgaagcaaagcgaatagctgcgctattttagcagcgattcgactttgctcttcaagtggtggaagtggaacaagagtttctttcaacttttttgaattaattgttggtacagcagatccttttacaaagtcttttatgtccaagcttaaaaacagatagaatatgaacttgtgatttaagtcattgtatggtattaatcccccagtattaagatcaaccaatgaatcttgagacaaaattcttttttttgcggttaatatagctccaccgtttttaggaaaaataattgtatttttaggcattacttgtcggctatatttttctccaacccaatttttcacgttttccatatataagttattattattcatatctttaaccttaaagtatggataaatattatcactacttgtgtcttctttcttgggagtttttccattttttagtaaacctacatcccccaatctaacccattcccaactatcaggaatatcaaaaggcttctcatcatcagtaatcggagcaagcggcttacttttcttaattttcttttccttaatcaactgctctttttcagctttaatcttctcaagcaatacactagctggttcatcattaggatcttgtggcaccagctttccgtgcatggccaaatacaagattttttctcttaaagcctgtgcatcaaaatctaaagtattagtcttcatcgtcaattccttctaacgccttattaagttccgcaattgcatccctaattgccttagacttgtcattcatctcatctaagatttctttcaacgaacggttatcgtgctcttcttcatcattcatccaagaaatatcaaggctagtattaggacgcttcaaaatttcatcaatcgtaaacttgcgccatctaccgttagaattcttctctttatcccaagtttcttttctctttgagcgatcgtcaacgcagaatagtttttcaaattccgcaaaatccctgtcacttaatggattacgcttaccaaatgaccgcatctgatgacgcatatcataaatccaagtttccttggtattatccttgtcactttcaccgcgagtaaagaataatacattggtctgcacaccttgagcgtagaaaatcccagtaggcaatctcaagatagtgtgcaagttgcacttgttgagcaagtcttttctaattgcttcgccaacaccatcggcaaacaatacattatctggcacaactacggctgctctagctttaccattgtgtttaagtgaattgtagataatctgcaggaagttcaattgtttattactagtcttataagttaggtcgtcacgacttacactgtcgtcactacccttcttggtaccaaatggcggattagttaaaactacatcaaaatctttcatccatttaccatttgaagataatgaatcccctagttccaatcgtccatccatgccatgaagatactcattcatcatggctaaacggtgcgtggtttcaactaattccataccagaaaaagcttcttttacttgaaattcttctttatctgcggacaaggttgaataatcatctgtttgatcttttaaatatctgtcagctgctaccataaagccaaaagtaccagcagcagggtcattacagcgatctccaattttaggctgagtcattctaaccatcatgttaatcaacacacgtggggtaaaatactgacctgctccagatttgacttcgctggcgtttttctccattagaccttcatacaaatcaccaaggccttcgtcacgagctgaccaccaatcaagtgcgtcaatatcttttattattttttccaggtcagcaggtttgtgaattgaagtagaagcatcagcgtaaattgaattgattcttggactattaaccacttcaggattacctaaatcaagtaataattggcgataaaagttacttaactctagtccttcctttgaaacaagattatcccattgatatttttgggggatatcatcctgttcaccttgttccttactcatttttaagaataagatataagttaattcagtaatgtaatcttggtaactgacaccatcatcacgcaaaatattacattcattccataacttttgaacgatttcttgattgttcacttaattttgctcctttaaaaattgtctcttttgaagatttccggtagatatatttgaatattagtaaatggatcatcattaatccagtcactctttttccgatacaacttattggcgtgatctactgcatcttgcactttatcaaaaatatattctcgataactattacctttaaagcgactataatcttgattaaaataggcagatctagacagtttctgtactagctcttttctagtataagaacgagtgacactttcaaaatgcattaaaatccaaatttcaaagtctattgaagaaaacataatagtaatatcattttttcgagcaagtttagcgcatttccttaattcatctttagaatgctcatctctatcgaaaacaacataagttttatctaaatgattatatttgccaaacttaactgctttttctactagacttttaccagacaaatctgcagcaactattttaactttaatatttgctaaacgatatttctgcttaagcatagtaaaatattgtttttcagattcaccttcacacagaattccaataattggattagacttagtcttatttcttattcttcccatgctcatccccatatttttcatgaatcatttgcaatacatctagcaaaccatctacatctattacaggaactgcaccgaatcggccttgtaagtatctcttagcaaacgaaatatcatgtcgacctttattacgtgcatcttcaaagtcaaagattgatttcaaatcactaattccgtgaaaatccttgtctaataaataaatttgatcaattcttaaatcgctgtctaatagctgaatatcatgagtagtgataataaactgattcaaattttctgttgaattaaaaatacgaactaaagcagctgcaagttcaacatgcagtgaatcatcaaattcatcgattacaatcgtcttctcgttaccattcatttgagcaagcatcattgctaatactatataaaataaacgacgtgtaccaacagactcttgtgttaatggaagttccccagaattaataacttcattttgatgataaatcttgtgaaccgtatatagttctttagttgttttaggataatcaatatttaaattctctacaatcttttgtaattgtggattcaacggattagtaggtacttctctaattctaatatcagagatattaaaatccgcaaaacttaagaatgagatcatttcttttttgaggtattcatcttccatcaaatttaaaagttcgtcaggaatatttactggatagccgctgccaataaaaatcagatcattaacaaaccacttatagatagcaatacaatctgcatcattttcagattgtgctaaatataggaataaagaattatctctaagcttaggaatgctgtcttccaaaagcttgttagagacttgaatgtcatttccatttcgagaaaaaatttctttttccttgttaccactaattaaggttaatgcttcactggtaatgctctctcgattgtaactaaatgaatagtcataaattttgttttttaactcaagcttcacttcaaagtaagtatcttcaatcttggacttttcatcaaacaaaaaaggataataatttaacttatcagttacggcttgagttggacgtgttactattccttccattgtttgtaaagcttgaatcaattgagacttacctgaaccgtttggaccaaataacagtaagctttttaataatgatggatttttacttgagaaagtattagtttctttcaatttacgtagtctattgcctgtctctgcagacaaggtagtgcgctctctaaaagaagcataatttttaacagtgaactcgattaacatattgtattcctccgtgttaatttaagtttagcacacgcctttttttatcacaacttttcgtgattaaaagcaaaaaataccagtaatggcatttttaaacatataaattctcattcaacacgtaaataatctgatcagcattttctggaaagatcttcttaatttgcttataacccccgtgacgtttaaagaaatagttatcatcaaaggctttctcagcatttggccccaatacagtagatgaaattaattggttctcaattctcttcaaccatttcttttgaggaatagtccaatcagctaaaccataaactttttgcatggcattatgaattctaacatcatgatccaccaactcagatccagccgcagcttgtctaatgaagctaataatatcggcagtggtctgaacatggttaacgtttttccatgcactttgcaaatcattttctttaaagccattttgctctagcttaagtttaatatttttgagttcatcaaaagttaaatccttcggtctagtagctacaacttgtaaggctggaatagtattgacgttttccttaacgaatttattgaagttttcaatataatccgctggtttttgattgccatgcccataacctcgacttacattaattactttgtctactgcgtctgatattatttgcttgggtttgacaggtttgatgtgatctaactgctcaaacttaggccattgctttaaaaattgggacttatctaacttacttaattcacgggcccattgatcaaccgaattaatctcagctagatgttggaactcatcacgtttagtatcatccaaacgtttaatttttctctcaacggcaccagccatatctacttgatactgagcggaatcctcatttgtctcaaagaaatcatccttgtgatttaagaagtagtgaacattatgtcctggatttttaacaacaggcttcatgtttgtcactttattcattgcttcatagattccgacggcatcataaatcgtaaatttggatttattaatttcgggacaaagtctggttgcccgtcccaacatttgctcatagaggattcttgactgaactcttcttaagaagacaatactagtaatttgcggtacatcaattcccgtagttagtaaatctacagttactgcaatattggggttggtttcattcttaaagtttttaatttcttgattaggatgccgaattgaaccagtaattttttcgatagcatcgtcatctacaggattactcacttttttgaatgcttttttcaataagtcaacaaccatatcagcgtgttcatcagttgccgcaaagattaaagttttacctaaatttggatcatttggatcaagatatctttgagctaattcatcacaaactacttcattaaagctacgtgtgataactctcttattaaagtcttttacatcaaaattcatattatcaggtaatttttctttattgatagttttttcatcctgatcaaaaagactaacttcggcaccctttttaaaatgaatcccttcttgagacaattgagtttgaataattactggtgcatcatgatccactaaccagccatcgaggacagcttgttggtagctatacgaatacaccggtttgccaaaaatatcaatcgtttgtaaagctggcgtagcagtcattccaatagcagtcgcatcaaaataatcaactacacgtctatattgactaacataatcttcttgactatagaattgatattctttatcgctgagctctttatcttctgcataaccacggtgggcttcatcaacaataatgaaatcatattgaccaacggatggcttatcatcactgtcttcactgaaaaataggcgtttgatcatcccctgaaccgttgcaatttgaatttttgttgatatttcaggtgccttatcactcaattcctttaatccataaatggaagaaattgacatcgtacctattttattatctttaattgcattggcagtctgctttcccaatgaattacggtcaactaggtaaagaatacgtctagctctcttatgcttaagtagtctgtacatcaaagcaattgccgttctagttttaccagtacctgttgccatggcaagcagaatacgcttttttccatctttgatggcattttccatcgcttgaattgcagcaatttgatattcacgatgtgcaaaatcaggaaaatctttatcatctaccaagtcttgatttgcttcttctttatttttagcagaaagcttcaacgataaatcttctggcttatgaaattcctctagagcatatgcgctttctttatgattacgtgcatcccagaaccaaataccagatttttcctgatattgtttaagatatggacgaccatttgcagtatagatgaatggaactttgtaatcacccatttcatttgaaactagacgataatctgatctaaacggtacctctttagaatattccttaggctgtgccatttgccctacaatatcttggtcccactttttggcctcaacaattccgtagaactccaaacctttgaataatgcataatctgctcgctgaccattaggtagaacccattcagcaattgccatattgtgacctttttgcggttcagttttctgcgtccaattgttcaatttttgtgaatctacttcccagcccgcatctcgcaattgttgatcaattaactgacgtgtttctgcttcagttaactcatgttttttagcaaattgaacgttaatctggcgtctgcgttcacgctcttcaggagaaattatgacttcctgcaccctattttgttgtaattgctttatcttttcttcgagagctttgattttatcttcttgagttttaattaaagctttttgatcttgtggctcaacataatctgcaactttatccagagaataaacttctaaaaaccatttccataccaaataagcactctgatcaatttcaagcgcaatctttttggtagcaataaaatgatcgtcatgcgttgccttgttccgtcttaacctgatcaaattaagagcattcaaaacagtaggtggatattcattcttagaatatgccattttttcaattcgttgtttttggtttaattcccaatcacctaaatcatccaaatgcatgatttctttagttaattgctcaccgaaagtaccaaaaactgtcaaactacttctaggatcagagtaaattaagctttcagcgctggaagccaattttgcgtattcttgataatctttttgtgaagtttcaaagttagacattgtttttcctctaatattaaagtaaatatagttttattctacctcgaagccccatttaataacaagtagtgtaggtacaaaaaaaagaagcaccaacacagtgcttcttttaacataaactaaataatcaatcgaaccctacttcgccaaaacatattcaaatcccaacatattggtatagcgattactacctatcttaatgtaatcatagcctttgatcctcttggtgccataagtttggacataattctttgtcctggtattctttgacttgatttcggcaacttttttaccctgggcatttaccacaggtgttacagtttgcacagtgtagtaatgtttgaccacttttagcttagatgcttcgaaattaccatacttaacatatttatttacatcaattttgacatttttttgccctttaatagtcataattgcttgaattttgtaaggggtccccttcttcagtaactttttcgtctttatacctttagcagtataaacgtatgcattactttgcaatttctttttcttgccaacagtaatgccatcagtgattaatgggctaatatcgactttgcgctttctaatggtatctgaagaatagccaaaccaaaatggactcttcttggtaacatcccatactggacgagttgttggatattgccaattacgtttgctgttataaagttgaacgtcaagctcacctgtaacttgaggctggtaatagttgtagatcaggttcatcactttttgaacctcataagtagttaactgatcagttagtctaacgagcaactttttaccatcaagtgctttagtcgtattagttaaaaacttgtcagcttgactaaccgcaacttcactggcatttgtctcaccaacaacagttttagcattttgcaaataagtcaagaactgtatctttttatcatagtcagctaatttatagcgatcagtcttttgaaccttttctgcagtggcaattgcagtagacaatgatgacttattagttgccaccttgctttgtgattctgcttcaccggctgtgttgattggcgtaagttttactccctcaacctttttgacattactagccaagatatagccttcattatctaacttattagttttagcattagcttcacctgttgtatggtagaaaagttcagctttcttttcacttggtacccaaagatagagtgcttcattaattttgtggttgctatacattgcagtttcttcaaccgtattggtatagaactgtttagatagctcttgacttgtcttttcaccgtcaacattgtacaaaagaatctttttatccaagacaactttggtagaatcggccaattcaagatctgaatgattctctaaagcttgtggcaaattcagatcatcttctgatacccaataattagtgcccttgatccggtagtatgaatagtgatcatgatcaaagtctgtcaattgttgtgggaattgtcccgcataatcaactgtgatcttttgtcctttcttcaattcaatattatttggatctgtaccccaacctgttgaattaacatactttgtaatggttgaagtattcttattgaccgttacggtaattggtgcatgagtagtaagacgatagccgtcaatgtaaccgatgttggccaccttgatataacgaccggaacctaaataatagtagtcttttccattaattatggtataaggaatgcgatacttacctttttgagcctcataataatactttgctttactactagtagttttccgcttaccagcatatttgactacgctaccctttttgacaaaaccaacttttttgccagacttattgtaaatattggcattaaaaattgccgttaaataagcagggccagatattggcgttacataatctgaagaaatataaacattcttgcgtaaaggatagtataactcaccagcactgtagtcgcctggatcaaccgtcttaaaaaatggttttccatagtatttaatcgtgctgcctttcttaggtgcagaaatatgatccaaataattgcccgagcgattgtacaacataatatgtgaatcaatgacttttaaggaaccagttgcattgcttttagtagctgcggcaactgatgtttgaacgtttgaagttagtggtgctgcggcaattggagacacagccaataacgcagtagaaattaagataagttttttattgattttcataatgaaccttcgatctaataaatgcagttaagatttgatcagttagtactcatatcatcattatagcagttatagttatttattccttgatattgagcctatcaaaaaagagatcgaaacccagtgtctcaatctctttagattttattttgttttcttcttacgagtccataatccacttaaactcaagccagacagtaataaccctaaccatgaaagatcactatcttgcctaccggttgctggtaaaacagacttagaggccgatctcggcgtaatttgttctactgtatcgtttttcataatagaagtttccgttttacagcaactaatctcactaccacttaagcttcagtttatggctactttgctctacctgtaaaaatgaatcaacgtagcgcttaaaaccaggtaaatatttggcaatcaaatgatattctcgtgaattaacaatttctttcttttgggctgcagaataattactttcacctacaaaaaagttccaattcaattgatctataaattttatgaccacgttagcatcatttttatctgataaagcttgcgcaatctgatttagttgcttttcatccaaactaaaaaacaaatgcttcaaatattgcgaaaaatctgttggcactttttgcttttcttccgcagttaaccacgattccattttgaaggaatgcacctgatattgcatccccgcttcgtctaaatatagctgaccatattcctgcttagtcatacaaaaacaagctcctgctacctccgcaattggtcgattagcaaacggaccaataatattctgtgcgtgcatatggccagaaaagactgcttttacattatatttttgtaataaaccttgcagtgcaagtgcattatcaagaatatatccctgatagattactttattatggcgatacagattatgatgcataaagaatagcacttgttgctgcttttgctgcgcatcaattaattctttttcaatccagttcatttgagattctgaaattcgaccgttagtaatcagatgagtttgtgattcctgcttgccataaatatttgagtcagccaatattagtcgatactgcttattcagattaacgctataagccagtgaatcaggatcttcatgtaaagcataatgataagaatcagcaaagatctctttccaaatagctgggctaatttgcggggtgtaatcttcatgatcacctttaaacttgcgagcccagccgtcaaaaatatcatgatttcctggtaaaactaagaatgcaattttatttttagttaatggcttaaaaatattagctaaacgttctcctgatattttagcgccattaaaggttacatcaccagtaattatcactgcagtgggcttctcttggattactttacgtacaaacgcggtcaaagcaatctcctgataatctaagtctttacctgcactagtgttgcgcatatgctgaaaagcaagaccatcatcatgtaaactatctgcaattagatgtgtatctgataataaccaaagaattggcttctttttactagtaatcacaatttacctttttcaaaaatctattttcactttaactactcatcattataccaacaaaaaaggcatccctgctagggatgcctcattgcgataaaatattgaattaagcgtcgatttcttcgatcttaatgttaactacgaatgcttcaggagtatcagtgcctgaaacgatcttcttagcgtaatcgtcgccttcatgaatttcagcatgtcctaaaacacgaaatgccttatgagtaggaacatcagcgacaacaatagctgctactgaaccattcttcaagtttgcataagcagttgacttagtcttttcaagatattgaatagttgaagcatcaattgccttaagtgaagccttaggaccaacttgtggcacaccgttagcattcacagttgccatgtatggtaagtgtgagttaaaaaattcaatttgttcatcagtaagcttagtagtatctaattttttcataattttcataaaattcgacctttcttttcttaagttcattattaattataagatatttgctataaaatagctattattttgccttagcttaattgattcttacatttatcatacacaagatattgtatttaataaaatgtgtttttaattaaatttctcttgctactaatatttttattaagtaaacagtcgttgatatatcaatgcttataaatgctggcaaaaagtcaaggattgaattttattttttagccagtagtatattatcttgcattagttaataagtgatacaagatattgtgcttattaaaataaaaatatattttaaatttcatttttattaatgttatttttagtgaggagaattcgatgacaaagaaaggcttaacaaaatatttatcaattggtgcagtaactactgcagcattatttttagcagcttgttcaaatcaaaagagcactacatctgctaaaaatagtaagacagaaattactatgtggcacgcaatgaatggtgcacaacaaaaaaatttgaaacaattgactaataaatttgaaaaagaaaatcctaacatcaaagttaagctagaaaatcaaggtaattaccctcagttacaagggaaaattacttctactcaacaaaatcctaataacttaccaacaatgactcaagcttatcctggttggctttatcaagctgcgcaaaataagatgttggtcaatttgactccatacattaataattcaacttatggttggggctcagtagccaaatctaatattcgtcctgaattaatgaagggtgcgcaaattaatggcgttcaatatggtattcccttcaacaaatctattgaagtcttgacttataacaagaccttacttaagaaatatggtttaaaggtacctaaaacaatggcagaacttaagtctgtttctaaagcaatttatgaaaagtccaaccataaaattgttggtgctggttttgataacttagccaactactatgttctaggtctcaagaatgaaggacaaacttttggtcgttcaatcaagttagattcggctgcctctaagaaaattattaacttctacgcagatggcgtacgcaatggctactttagaactgctggtagtgaacgttacctctccggtcctttttctaatgaaaaagtcgcaatgtacatcggtacttcagctggtgaaagctacactaagatgggtgtaggcaacaagtttacgtacggcgttgctcctcgtcccggtgaatacactatttctcaagggactgatctttatgtctttaaccatgcttcaaaagcacaaaaaaatgctgccatgaaatatatgaagtttttgactagcaaatctagccaattaacttgggctaatgagactggctatattcctgttaacgataatgtcttaaatagtaaggaatacttagacagcaagatgaaattgccaagtgtcttaaaggattcaatgaagcatctctacagtgttcctgtagctaagaattctgactctgcttataatggtatgaatcaaattatggaaaatattttaattgctgcaaataagcatcaaaatgttaatgctcaaattaaggctggtcaacaaaaattagatagcgcttggcgtcaataatgatattaaaaaagcatccctcttctctattttgattagggatgcttttttgcatttgcaagagttgaatttaatttaagcactcacatagagtgcgacgtgcaaagaacctacttttgactggggcaaatgtatttcatccaatcctaaatatttggcttcatcaactattatactatgtcaaaagtatataaagaagagttaacacataaaatacaaaacaaaatcagtgcgaaactccctcatttttatgttcacatagggttcgcactgatttttttcttaactcaaatctttcttagtaactgccaaatgtgccttatcattgataaagacccagattggcaaatctattcctgttgaatcagtcaaattatttacaatttcactgataaaaagctggaccattttcttaggcggttcagtaaagtctcttctttgcggcgtgtaccataaacctgtgattggctttttagtttgtcgatcgaaaatacaattcagggtttcatcatattgatcaaatgaggccttgtagactatatgtaatggatgatgtgccaagttctcgactaactgataacgcatatcgtccgcaatttttcctttactaatcatcattaaactggtaactggaccattttctttttcaaatttttgcaacttgccttgtttgattagcttcttttcaactgaaataaaactatcagaatcaactaacatcgtttttccttctcgtattatataaattaaatcagtgataatgattattcttttagtttgtttattcgatcatcagatgctagtctctaattgtcattgaccttggtcaattggtataggttgtttccttctgtagctttgactacttttttagtctgccgcccaagcagttttactaatgacttactcacatgctgtatcgattctggctattactgattcagagcagattcagtcgcagctttttagcttgaacctatgaatacttatattttgcgagattgtcttagaatctgtaattagggactaacatgtgatgatcgatctatgaccaaatatttgctagaaaggaggccattctcaatgaaactttttatcggaattgacgttagttcaaaagatcttcaagtcgctattactgactcagaaaattatcaaaaacctttacttaaccaatctttttctaatgacctgattggtgctaatgaggtcaaaaagataattcttcaacttgctaaacagaacagctatgacaaagtaattatcggcatggaagccacttcaatctatagctttcaccctgcttatttctttgccaatgacgaagatttacaaaaaattaatcttgaaactgatgtcattaatcctaaaaacactaaacgatttcatgacgtttacgaagaaaataagaatgatcctactgatgcctattacatcgctgaatacttacgctttggtaaataccatgtcactattgctcggcaagaggaatacttagctttacagcgtttaactagagctagatatgaaatcacatcttcgctcactagagctaagcagcacttcattgaaactctttattatcgtgtaaacaaactagttaccgttgacaaagacaatattaaaacttctatctttggcgcaacgatgctgtcaattgttactgatagtaaaaccatcgatgaaatcgctgaaatgccaatcgaggatctaattgactaccttcaaaccaaaggacgtggccgcttctctgatacagagactttagctaaagcgatcagaaaagccgttagaggatcatatcgcttaggtaaagtcatgaaagactcgattgatgccgtattatctgtttactatgccgaaattaaaactaatcagaaattgattaagaacttagataaagcaattacagatatcgtccaaacgcttcctgaagagagaatactacaatctattccaggaattgggtcagtttattccgctggtattatcgctgaaatcggcagtattgatcgctttgacactgaagcacagctagctaaatacgctggtctagcttggcgtcaaaagcaatctagtaattttgatagcgaacacaaaccgatgactaaaaacggaaatcattatctaagatattatttggttgaagctgccaacctgattagacaaagagatcccgtttttcggaagtactatcaaaagaaatacgatgaagctttctattctccgcataaacgcgcttgcgttctttgtgcaagaaaattaaccaggaccattttcactctgctcaaaaatggtcaaatctatcaaacaccgaggtgattaattggtctaaaacatttttggaggagtaaataatagttgttaaaaaatcccttgaaatagggcttagtttcatgcacgcaaattttggttttaaaacaaactaattaaaaataaaatttaacttttacattgacttattaccacatgactctctactatctattataagcaagctgtcaattactttacataattttaattattatgcaaaaaaagaagccatgacctgaaaatcatgacttctcgcgaattcctcgtccgtaaatcgaaatcttcacgaacatttttaccttaacacaattaattatactagtctaattaattttaattactaaagcttcatatggcttcaatgagatattctctcctagtttgccatcttgtgcagaataattgctcaatacgagttgataattcttattttgatattgttcaggcaatggtgctacatgatcagtaccatagaaattagtgaaaactaatatttttttagcttcatctttcaaaaaacgttcataggcaaaaatttgtggatcatcttttaaaaacattctaatatggccatcagaaatcagttgttcgtgcttacgcaacttgatcaatttttgatagtaagcaaaaatttcaccctcgtgtaattctttttcaacattaattctatcttgatctgttggtaaaagccatggctttgattcactaaagccagcaaatttactatcatcccagtgcatcggcacacgagagttatctcgtgctttagtttttactattgcaaatgcttcatcatcgcttattcccttttgtttcaatgccgcaaaagcatttttagcttcaacatctacataatcatgaattgaagaataatgtggatccatcattcctatttcttcgcccatataaatgtaaggagttccgcgcatacaatgtatcgcagtagcaagcatttcggaagatttctctcgatatttaccagtatcaccaaaacggttaagggcccacggctggtcatgattgttccagaacaaagcattccaaccgccaccttgatccattttttcttgccattcagtaaataagtgctttaatttcatgaaatcaaacggctctttagaccacttttcaccatttttataatcgacttttaaatgatggaaagtaaagaccatggacaattcatgctcactcggcttagagtactcaatcgaattagcaatagtagttgaagacatttcacccaccgtaattgagtcaggatcttgaccaaaagtagagcgattcatttctttcaaatattgatgcactactgctgtatcagtataaagactcttttcctgacttggatcaccagttgaatcaactaacttttcatccttaccggtcacgttaattacgtcaaaacggaaaccatgtactccctttgaacgccagaagttaattactttgaacaattcttgacgaacttctgggttatgccaatcgagatctgcttgagttggatcatataaatgtaggtaataataatccgtatcaccaaattttgcccaagctggtccaccaaacttactttgccaattattaggcaaggagccgtcaggcttagcttttcttaagtaaaagaatttgcggtacttttcgtctcctgccaaagcttttttaaaccatatattttcggttgaacaatggtttagcaccatatccaacatgacgccaacgcctatttcttttagctttttagttaattcctcaaagtcagacattgtgccaaagcgaggatcaattcggtaataatccgcaatgtcataaccgccatcattctgaggggatacaaaaaagggattaaaccagatcatatcaacgttaagcttcttgatgtaatcgattttagcgatgatccctggaatatcacctactccatcgccattagaatcataaaaagatttgggataaatttggtaaattacttttttgcctaaatctgtcatttttatctcctataacttaattttctgtctacgagcaaagtcaataaatttaaactttttaggattatgaaaggataaagttaactgaaacagcgttgtatctgctaaaaaattatgactagctactagtactgcttccttactatccaattgcaatttctcttgtaaatcagcatcgatttcttctaccgtaattgccttagttgcataggatatatctagccctaatttattttctaaataattgtagattgatttttctgcttcttctgatggaagctcagtaattggtggattaaataagaaatcacagtccagcacttctggttcatcgttaatcattcttaaacgttcaacatagatccctgcatgcttcttttgttcagggaagaatttcttgaaaattgccggcaaatcatcaaccatttcatcattaagtagcttagtttttgcattcattcctaatgatttatttaattccgcaaagctagaaattcctgaaataggaaacgaaaacttttccaaattaaggacaatcgaacctttgcccttgattttttggattaatcctaacgaggtcaattgctgcaaagctttacggactgtttcgcgtgacgcgccataaagctctgtcaattgattttcactaggcaagcgctcgccttccttaaattgttgatgtttaatcttagaagctaagtcttgagcgatcagttcagattttgctttagtcatcttgaccttgtcctttcttaaaatcatgttcattatatttttgatgtacgtacatgtcaatagatatatctaaaaactatattgcaggcatgtaatcattttcataaaaatctattgacaacttgtacgtacaggaatattataataaatgaattttgtgaaaacgcttttataggaaagggagaataacacttatgaataaaaacgaaattgcattacttgctcctgctaatggtcaagtaattgcactaagtaaaacaagtgatcctatctttagcaaaggaactatgggtgatggttttggtttaacaccaactgataatacagttcttgcaccagttagcggcactatctcaatgattgctgaaacaaagcatgcgatcggaattactactaaagatggtctagaagtattggtccacatgggagttgatacggttggacttaaaggtgaaccgtttgatgtagtaattaaaaatggtcaggaagttaaagctggtgaccaaattgccacgatgaatatagagatgattaaagcaaaagatcttgatactacgattatgactttaatcaccaattcatctatgaaacttgatggcttagatgtaactgaaggtaaagcagaagctggcgatacagttgctcgagcttatttaaaggagtcaaaagaagatagttcagacaagaaactttcgtatgatgaattagctactttcattattaagaatgttggtggtaaagataatataaataacctgattcactgtatcacacgtttgcgcttttatttgaaagatgagtctaaagccaatgatgatattttaaaaaatcaacgtggcatacttgacgttatgcatgctggtggtcaatatcaagtcgtaatcggtaatgaggttaccaatgtttacgatgcagttatgaaacaattgcctggtcttagtgacaatccttcacctcaaactaataatcaggatgatggtaaaaatcctgtttctagagcctttagtaatctaattggttttattaccggctcaatgagtcctgtaatcggtgttattgcagcatcgggtatcatcaaaggcttacttgcactactcacccttccacaacttggtgctttacttagcgtcaagagtccggtctatgtcacagttagtgctatggccgactctgctttcttctttctaccagttctagtaggatttgcagcagctaagcggttaggatccgatccaatgattgctgcagtaattggcggtttcttagtttatccacaaatgattacttggggcaagagtatgacgacaatgtttagtcttggatcttggaacttccaattcttaaactattcctactctatctttccaatgattttagctgcttggctagctaaagaatgtgaacagtggttaaagaaagttttgcctagttacttgcaaatgatctttaccccattaattactatccttgtagtttcaactatcacattagttattaccggtccaatcattcaaggagccgcaaatggtatcgcagtctttattaactggctagtatctgcatctggctgggttggcggcttaataatcggtgccttttatcagttattggttatttttggtcttcactggggcgttgtgccactagttgctcaacaaattgcctcaactggtcaaagctcattaaacgcaattatctgcgcaacaatggtttcccaaggtgcagctgttcttgcagtcgcaatcaaatcaaagaaagcagatatgaaagagctaggaattgcagcagctatttcagccttctgcggtgttactgaacccgctatttatgggattaacttaagatataagaaggtctttgcttcaggttgtattggctcagccttcggtggcctagttactggtttaatgcatggtactatgtatggctttaccggtggtctaattggcttctcaagctttttcaacccggcccatcctactccactaaatagtttctatactttcctaattgccagtgctgtttcaattatagtttcatttattgcagtttgggtatggggatataatgacaacatgactatgggtaaaaaagtagccaagaagcaacgcccaggttcagctaaataaaaatttagagcaaaataaaacgatgaatcacccacaaaggtaaattcatcgttttttgtcttatttaagcagcatcagcaatccgttgtgcctcaattaattcagcttttctgatatcacgaggcaagaactgacgaatatcttcttcattatagcccacctgcatccgatggtcgtctgcaataataggtctctttaataatcctggattctgagtaattaaagcaaccattttagacaatgacaagtcttcattcaacttattctttaattgtttgaaagactgtgaacgagtagataaaatatcctcagttccattttcagttaaagacaacagatgaaggacatcttctttagataattccttaaagacgttcttttccttgaaagaaagatgatatttgttaagccatgctctcgccttacgtgaagatgcactacttgttgacatataaagagtaatcatacaatacgcctctttctaaaaaactcgttaacttctcgtacattagttctattgtataacttactttttgatagtgcaagctatttttacaaaaaaattgttgaaaatagtatacttaccttactgaaagaaggaatttgatgaattttaaaacaccaattgccgaacaaatgaggccgcaaacactggcggatatggtaggccaaagtgagttgctgggaccaggaaaggctttaagaaatattatcaagcagcatgttaatatttctttacttctctgggggcctcctggtaccggaaagacaagcttagctcaaattattgctaaagagaatgattatccctttgcttcctttaatgcttcaattgataataaagcacagttgaacaacattattaatgcttataagtatcagactctcgttcttttaattgatgaaatccaccgtatgaccaaaaatctacaagattttttattaccttatttagaaaatggtcacgttctacttgttggctctaccactgaaaatccaattatgtcgattgtgccagctgtgcggtcacgttgtcaaatctttgagttcaatcctctaacagaagacgatattgcagctgttttgaacaaggcatgtactaaggtccttaaattagtagatcaccaagttgaaaaaaattcgttaaatttgatagcagccgcagctgatggcgacctacgaattgctttaaacattttagagactgttcatgcacttaatcctaaaaagatcaccttagcaaatgttaaatcgtttactaagcagcaattctttagctatgataagaaagccactaaacattacgattatttagctgcatattctgactctatggctggctctgacacagatgctgcactttattatcttgctattttgctaaaaaatggagatttagcttcggttgtacggcgtctgcgtgagattccatatacttatattggcttagctaatccgcaacaagtaactcaaattgttactgcagctaatcaagctgaaaagataggaatgcctaaagctaaatatccactaatgtttgcaacaatgttaatgtgtatttcgccaaaatcaggagcatttgaggaaatttgggaaagacttgatcaagatagtgatcatcccaatcggtatcccatgcctaatagtttgcgtgactttcattataaacacgctaaagaaatcacgggagctggcctagctgagtcaccttttcaagctccgcatcaaatcgccaagcaaaattatatgcccaagggactcaaaggcaaacaatattattttccaaaagacaatcaaaatgaacgcagattatatgagcaatacctaaaattacatcgttatatttacggcgaagattatcaaaaataaaggacagcaatgcaattgagcatccctgtcctttttggttagattataaatgaagaaaattggtttattaattgcttctacgagagaagattctcgtccagccacctatatggtagttctatttaagttatttgttaaatgctaatcgaaaaaactttacgtactttttacgtattttattaccaataataacaaaaaagcagcggcgcaaatacagcgtcactgcaatatgtagcaagattatcaatgaagaaaatggtatttatcacttctaaggaggaaggatatttcatctagccacttatatcctaatgctacagtattaatttgttaaataaaacggctattaaatctaccaatatttttctagtggcttttcattcctaccagtgcgagtttgacgcaaatgttcagtcacaatattagtcaacacttcggctaatttatcaatctgctcaacagtcacatattcatatcggccatgataattgccaccaccattaaataagttaggtgtaggaattcctttaggcgaaataaagtttccatcagttccacctctaaaggattgtacatttggctttagtccagacttgcgataagcatcaagagccagatttacaatatatggcttgtccttaatatagttgtagatattttcatattgctcacgaatatttacagtaaatctattgccatactttttgttcatctttttaactatatcgcgaataaactgttctttacggttatattcactttgatcaaaatcacgaataatcatgctaatatcggcatgatcaacattgctttgagcatgtagaaccaagaaataaccatcatgattacgtgacttttcaggcacttgatcctgaggtaaattagacaaaaaatcattcatcaaagttgttgcgttaaccatcagaccatatgcttcaccggggtgaactacagtccctttaatatggatcgtaacctctgacgcattaaaggtatcgtattcaaaatctcctggccgcccattgtctaacgtataagcgaattctacattaggaaaatcagctggatcaaaatattgaccaccacagccaatttcttcgtctggaccaaaagcaacaaaaacatcaccgtgttcaatttcaggatgttcagttaaatatttaagcattgctaatgccccagtgattccagccttatcatcaactcctagcaaagtatgaccatcagaagtaattaaggtttgtccttttagatttaataagtctggaaactcagttggatcaagaacaatattatctttctcatctaggataattttctgaccatcataattttcgtgaatttgtggcttaatattaactgcgttaaagtctgcagtatccacgtgagcaaagaagccaataggcgttaccttttctgctgtgtttgcacttaactttccaattgcaaaagctgttttttcattatagtaagcatcaagcccaagctctttcatttcctttactagttccttggccagctcaacttggccaggtgaggaaggaatctgatcatgatgttcataatatgagcgagtattctttttagctaactgaataaaccgtttttcttcataatctaaattataaaaactcatatcatattccttcttacattaattccatcgtatcacttgaaactggctcagacttgggatctgaccaccacgactctttaactgttttgataattttaaaaccatgctttgcatacagcgctttagctgctatatttgcgctaaagacttctagcctaatcggccgtctaatatttggtaacactgaagctagcaattgatcaccaataccacgtcgttgaaattgaggatcaatataaaaataagctaaattatgtggcttatacgcagcaaagccagcaaattcattattaacttctacaatcctaatctcagaatcaaagaaattataccagtatggtgcttccttaaacggaataaaatatttctccactccgcctattttcatttcttgcaaacgagccgcatcatgaacccggcacaaatcttcgtaatctaaactttgaaaacatctagttcttacttgcataatttactcctttaggtgaaagagttaataaatttttatttttctttaattatacagaagtgaattatacatttaaagattttagttccaattcaaccagtcttcatcaaaaaactcaactttttcttcctgtgattctaatttctcttgttgcatcatagctattatcatctcatctttctatttttagaccattagttcgcatagaaattatatcaaacaaaggttcatctttctactctttttcaaaaaaatattaattgagttagtaatagatgtgaattacctatatttttatccacaatcgcgataatatcgggcttcagagccatgtttcacgtttattgtttacatttagctgtttttccaagtaatcaaatagcttttcactttataaaaattgtttcataaaaaaggatccaacttaatggatcccttaaacatgttattcgtaaataattacaggttcgccctttttaatattgttccaaacgcttcgaatctcacttggtttaacattaacacaaccatgtgagccaccctttaggtaagcggtcttgctccaatcagtccgccaagaggcatcgtgaaaaccacagccacttaaggtaaatggcatccaatacttaactggagaagcataacttgaaccatcatcattggtcccacgcaatgtacttggtgattccttatagtggatataccacaccccacgcggagtttgatcacccttagaaccttccatagtaccggtaacaacatcacgaagatgaacggctagtttaccctttttgatcaaccatacttcttgctttttcaatgatacaacagcataagtatcaccaatctctttatttgaataaccatagccgtgaggataagtgctgtagcctaaaccgtaaagtgcatctgcaccatcaaaatttttttggcctttggcaaatgcttcgagaagtaagcgttgcgtctttttaacataaacgccccaaccccaagtcttattctttaccgttatggttttgcctttaactttattgccctttggcactgtaaatttatagctcttgtgtaatgttgaaacttctttatcaatttgatttaacttagtcgttaatttactagtatcaccaaattgatagcgattatctcgataagtcacattattcaataaatctttggcctttaattgatagtttttgccattaattttataagtaatctctgctttgcttaagtcagttagtttctttttagctgtagctaaattactagtagtaaacttataagtctgagtcgatggaattttagtttgttgcttcttaaaaaaggcctttgtctcggactcatctaatgattggactgtagtgttatagctataaaccagtttgttattttttaactcaacttgatttttagctttttggttaactttagccattgccttagtaacggttagctttcctactttaactccatcgattgtaacattagggttaaagtgagttttagcatatttttctgctgcagcttgtgttgccacacggtgattatgaatgccaaaacccgcgattactccaacgataattaaaactgcaatcgttaaaataataatattgtttcgtttattctttttctttaggtcttcgttcatactatcctaccttttatgccagtaataatatctttaatatagcaccttgcaaatttcgtgtaaaatctattgatttatctaaccttttttataattagacgactagaatcccgcaaagcaaaatataaaattggtgtacaaattgcagtagaaattgaattgattacagttgcaggcaaactaacaaaggctccaactaacgctactttaaagctcgtccccaccattaaagcttcaacaattgaaacgcaataagtagtgaatatcttagttacccctgcaataatacctaaaataataatatttcttttactatcttgatagtgcattcctcgataaactgctgtcaaaaccgaagccactactactacctcaagcatagttaaccatgatgttgcggcatagccatttaacaaatcaaaaccacctagaccaataattcccgcaatcataccattacgataacctaaatataaaattgctacagcagttagcgtatttccaaaatgaataaatgggcgtcctaccatagcaggaacggggattcttaacacccagatcccaatataaataattgccgcaaaaagtcccgttaaaactaaagcttgtaaagaattcttgttttctctaaatatctgcattattaattattactccatctcttcagtaaatctggtaaagctgctgcataatttggtcctagacgtgaatcttgcttgggtgtttccctgattgcttgtgcaacaaaatcggccgcaattgaacacgctttttctaaattttctttatgcattaaagcagcaaaaaatgcacttgcaaacaaatctcccgtaccaaaataattacctgggagttttttctgaattaaagaccaactatgatcggctgtaattccaacttccgcaattttttccttattaagtgaaataccggtaattatgacattcgagacaccaaattgactagataattcagccgcaaattctgttgctgttttcaatgaattactagttgcctttttgcctaataaaaatgctgcttctgtcatattcggcgttaaaatcgtagccgacttaactagatttcgcatctttattacatagttttcatcaatgccacgataaagttgaccgtgatcacccattactggatcaatcaagatcaatttatttttttgtttaaaatagctaatcttttctgtccaaaaatctaatgctcttttgcccaaatagcctaagtatacagctgaaaaatcaaaaccaaccttttgccaatgggccataatcttagccatttcattattcaaacttaaaaaagtattctcaccaaagccacccgtatgtgtagacaaaattgcagtaggcaatacggtcgggctcaagccacatgctcctaaaacgggtaaagctgcactaagtgatacttgaccagcacaagataaatcttggctaactaatacgccaccattaaccatcttttttactccaatcaaaaaaaacctgctttaagcttaacatgaagtttaaagcatgaaaaattttattttgcgctaaatgtattagccttgatatgattcaaaatttgataaccaatttgtttatttctgttttcatcattttgagtttgatttaagaacataatcaaaccattttgattatctgtagtcatctgaatccagttaccaaagtgagtattatataagttaccatatgctaacttcaagttatcattattcttcatatataaaccacctgaataaccatttgatgaacgtgatgttaaatgagtcatataatcaaagtctgttcgactcaaaatttgcccattggttaaaccaagttgaatacggtaatagtccattggagctgagaacaaattaccagcacctaccaattgagaagcttgagtctttttaacatattgagcccattggtaattcttttgattccaggtatatgagataccatccgtcatcccggctggaatatcttccaagaaataagttcgctttaagccaagcttattaataattcgttcctgcacattttgcttgtagctttgtccagtttcttgacgtataattccagctaacaaaatatagttggtattattgtatgaaaaattaccaggttgattttgcgtagttgagtttagcttattaacaacccaattaattgcatcagcttctgaataaacacgtcctctatttacttcagtatcagctgctgtcaatccagaagtatgcgtcatcaagttgccgacggtaatattatcagcaccttttaaattaggataccacttagagatcttagtatactgtgtaaacttccctgcagaaattaattgagtgataattgcgccggtaattactttttgcaaagaacaaacaggataaactaccttactgtttcccgcacctaatcgcttgccataataaccataaccataagaaatttgttgtggttgtccatcttttactataactacggtaccacgagcataataactagctaatgtatttctaacaaagctccgcatttcagttttgttataacttgctgcctgaactgtcgagctattggcattagcaattgccattccaacaggcattgaagcagctatagttaaccaaatggttgatttgattaatgttttttttaaattaatacgtttcgttttaaattcccccagcaatgttatgtaaattctacccataatattagcatttatttttttcattggggttacaattttgataaagaatcaatgagaacgtatacattttctttttctaatatggataattatttaaatgatcttgatcagtaatctgacgtattactttagccggtacccctagtgccaatgaattatctggaatatctttagtaactaccgatccagctccaataacgcaatttttaccaatttttacgccgggacaaacagtaacattgctggctaaccaacaattatcgccaacagtgatagctgctccatattcaatatcggctatttttccgtctgattgcttgcgagcatttctttgagttggcaacaaaggatgcaatggagtcgcaaatgttacgttaggtccacacattacattatttccaattgttacgggacaagtatccaaaatagtcaaattgaaattagaataaaaattatctcctaagtgtgtaaattggccataatccacttcaattggtccttgtaaatatacattttgaccatgattcggaaaaagacgatcgataattgctttccgttctacctcatcttcatcagtagtcatgttgtaatcacgtgataagcgatgagctaaactggaaatctttttcagttcttcagtatctgggcgatatggtttacctgccaacatttttttagtattttcttccatcgataaagcctactttctaatttaatcgcttacttaaataaatcatgtctactagctgatgtccagcttcaaaaatcggatgatcataattttttacaaaaaaatctttgatcttacctgagcgtttaaaaccacatttttcataaaaaggaatagttaaggggctatcacccgttccaacttgcaaaatttgatatttattttgatacttcttagcaataaaattaatcaaatgtttagcataccctttaccttgatcttctggataagtggctatattttttatttctactgtattaccattttcaaccgtaataacacattcagatctaacttttcctttatcaatcaagatatacataattccacgttctaaatagcgatcaatcatactctcttgttcatcagctaacaaaagtaagtctatatactgcttcttattagattttatctctttaatttccatgattattttccaattaatttaaaattttcgtaaattgcaataataacttgaacacttttgtttaggctgtttgatagatgcgatctaattctctttcaaagatctcatctggtgtatgataagccaagatctttcttggcaatgaattgcaccaagtttcaatattaatgatttgttggagagagtagttatgaatatagtcacctttaggaatgaatctgcgaataaggccattatgcctctctacagtgcctttatcacaagaagtatatggatgagcataataaactagtgatttggaaatatcttccagctgagatagatccgcaaattcagaaccattatcagtcgtaatagttttaaagatatcgttccaatgctcgctgtattgcttgcgcagacttttaaaggcattcattacactggcagctgttttatctgggattttaataattaggaactcacggctcatgcgttcagacaaagttagcagcacttcgtcgtccttggtcttatggcctaaaacaagatcacattcccaatgcccaaacacatcacgcttattaacttcctgtggtcgttgttcaatactgcggcctagcttcttcttatttttacgaatgcgatgaattttggtattgcgcttgagtttctctggcaaatcatagttatggatgtttaacaagccttgatcgacataattataaagcgtcctagtgcagacaatatcgttgctggtaaattcccctacagcagtgcagcgattactgcaggcgtcgagcgaccagccatcttcaaaaaagtgctgttggacgtaatcaataaacttatgcttcttaagaaaatccgatttgcgtccacagtatcgacgattgttttgataaacactctgaccttgttgggctttataacgtttaactttaccgtgatacagcttaacagcccctagtttgatctcatagtgaattgtactaggggaacagccaatttctcgagcgatggaacgcaaagaacaatgatctttcaaacgagtttgaataataacccgctcttcaagcgatagatgtgttccttttttacgcttgtccatgatagaatgtagtgagtccattttgacctccatagatgtttttgtggttattaacattctatcaaacaggtccaaatggacttttttattttgtatcaagtgttcaatttaattttacaatcggcaaatttaaaatttttctctttcctgaattgtcaaattaagtgcaacagttaggctatgaggaaatatattgcttgaagagttcttctgctgtgtgatattggaggattcggcgatatttgtggttaatggcatcagttgcctgttgaacataagcttttgacttgtctttcatgctcttgcccttagggaagaattgacgcaaaagaccattgcagttctcattggtgcccctttcccatggagaatatgggtgagcaaagtaaatctggcagcccttgatcttggtcatatccgcaaactcagagccattgtcaaacgtgattgatttaaaccaggcaggatgtctgtcaatctccttttgaagcagcctttggcatgtgcttgcccgatagtcaggaatcttgataactacttcaaagcgtgtggttctttcagtcaaagtcattaaagcaggctgattcttgcgtctgacgcctttaaccagatctccttcccagtgcagcggagcttttctgtcttcaatctctttaggacgctgttcaatggaattgccaagatgcttcttgtgcaaagcgtgaccgccatggctgtgatgacgcttgttcctgcgtcttttgagcttcataggcagatcaatattgcttatgtccagcaagccctgatcaatatagcgatagacagttggtgtgctgggacaagggtagcctggcatagtccttttgaattcaccaacgaactcatcgatgctggtggcatcaaatttagctttaaagcgtctggagagcattctcaaaaagacagcataatgcttcaatggattgcgctgatagcagtttttgcgacgcttctcataataaatctgtgcagtatcagcgtaatagtgctcatacaataaatagctgctgtctctttgcaggacacttccgcgtttgatttcgcgactgattgtcgacttatggcagccgacttcttgagcgataacagtacgggaagttatgccggaatccagcattgcttgaatttgtccacgttgtacgctggttaattgatgatagtgcttagaaatgctagaatttgaattggtcataaagatcttcctttcttgatttttcgtcacttcaagtttaggtcttcatggcctttttgtttaacacttagtgttgcacttcaattttaaatccgggaatttttctctttctactcatattctatgataaactcattattgttataaaaataagtataaacgaggaaaaaatgcgcaaaaaaaatatttattctatttgtatcggattaccgatctttttgattcttgcattctctattatggctcatgcaagttgggttaccggctttgacaatttctttgaaggcttagtccacagtattcctaatctgcagagcattatgcatgtaattacatttttagcagatactaaagttgacttagtttggatgctgttgatagctgtcattctttggctgaaaaagcagcgtcctctttcggcaagtattgtcatttcactagttacagctgatgcttttggttggattgttaaacatataatccaacgggcacgaccaactgctcacttagctgctgatgatggcttcagttttcctagtggccacacattaggaatggcgattattgttttctggctaatactaatattgattccagctttagttaaaaataaaactgctaaaatctggctcactgttttattagctatttggcttgttttagtaatgatttcaagagtttatctctacgctcactggccaagtgatgtttgcggctcagttgctatgggcttaatgtggattggcttagtagatgcaatttgggataaagttactccacaaacagacaaaaataatttttaagattaaaaatagtcgacgataagtcggctatttattttgggcaaaaagaaaaagtcactaaggaaaatgtccttaatggcttttctacaccttcaaatttcttcctatcagcagatgtcataagaaacatcttgcttagccttttcatcctcggagcgctcatcacacgctccgctactatgatatcaaataaaaataaaaagataaagatttttacttgataaatttcaaaaaaagtatatcccggatttaaaattgaagtgcaacactaagtgttaaacaaaaaggccatgaagacctaaacttgaagtgaccaaaaatcaagaaaggaagatcttcatgaccaactcaaattctagcatttccaagcattatcatcaattgaacagcgaacaacgtggacaaattcaagctctgcttgattctggcataacctcctgcaatgctatcgctcaagaagtaggctgtcataaatcaactatcagccgtgaaattagacgaggcagtgtcctgcaaagagacagcagctatgtcttgtatgagcactattacgctgatactgcacaaatttatcatgaaaagcgccgcagaaactgctataagtgtaatccactgcaacactatgccgtctttttcagaatgctaagcagacgctttaaagccaaatttgatgccaccagcattgatgaattcgttggtgaatttcacaggattatgccaaattatccatgtcctagcacgcccactgtctatcgttatattgatcaaggattgctggatataagcaatatcgacctgccaatgaagcttaaaagacgcagaaacaaacgccatcatagtcatggtggccatgctccgcataaaaagaatcttggcaattcgattgaacagcggcctaaagaagttgaaaacagaaaagttcccctgcactgggaaggcgatttggttaaaggcgtcagacgtaaaaatcaacctgccttaatgacactgactgaaagaaccactcgttttgaggttgttatcaaaattcctgactatcgggccagtacttgtcaaagactgcttcaaaaggagattgacagacatcctaattggtttaaatcaattacgtttgacaatggttctgagtttgcggatatgaccaaaatcaaaggatgtcagatctactttgctcatccatattctccttgggaaagaggcacaaatgagaactgcaatggacttctgcgtcaattcttccctaagggcaaaagcatgaaagataagtcagctgcttatgttcaacaggcaactgatgccattaaccgcaaacatcgtcgaatcctccaatatcacacagcagaagaactcttcaagcaatacgttccttcatagcctaactgttgcacttaatttgacaattcaggcaaaaaaagtatatgaattattaaaaatcaaatttgtatattgctatcatttttaaccttttttagctccgatttaactgatttgcttttagcattgttaattgtcttaaaaaaggcggaaatttggccaatttctttttcggtagtcgaacaacagccacctattattctagcaccatgttcataccactcttggcttaactttttaaaatcgaattttgcattaaatggaatccaattgcgctcaaattcgttataaacgccacccaagttaggataaatgacaatttgtttatcagtaaaatcatgaattttatcaattactgcagttgctaaaaacggtttaaagcaattggctccaatcgcaaatacttgatcatattcattaagcttttgcactacccgctttaaaggagtgccatcactaattttagttgtatcatgcaatgtaaaacttacatacactggaatttccggagcattttcctttaaccaatctaagattgctacaacttcatccaatttaggctgagtttcaagtgcgagacaatcaggtttatttgccaataaaatcttcaatcgtggtaaatgaaaattaagatattcctccgttgttagagaataatctccgcgaaattcatccccttgagctaaatatgcaccataaggtcctactgaagccgctacataattatgaattcccgttgtctttgcaaaatcatcacgggcttttttggcaatttgaactgcattagtaatcaatttagtagcctggtcttgtgtaaaaccatgtttttcaaaagctgggatatttgcttgataagtatcagtaattgccatctgggctccagccttaaaataattcatatgtacttgataaatttgagcaagattatgttctaatgcaattgctgtccaaagttcattatttgtatcaatgcctaacttctcaagagctgtagacattgcaccatctaagattaatcctcgatcacggatctgtttgagcaaattcatttttctcaccttagtataaattgagtagatagttaatatatatttaatattgcattaatcttagatctgtttcaaatattatttcttcctatgtcttattttttagctacagtttgctataaatttatttaatgctattttcatataatattaaaatagatttttgaaatcatgtaaataattggccaaatagtgtgccgttaaactttcaggcttttgctttaattctaaaggcttaccctcttggacaatccgaccaccgtttttaccaccatgtgggcctaaatcaatcatgtaatcacaattgacaattaaatttaaatcatgagtgattgtaataatggtagctccctgatctaacaacttttgcattacttggaccagaaccttcacgtcaagaggatgcaagccaatcgtaggttcatcgaaaacaaacaatgcatcattttgtttatgactaagatgagtaacaagtttaaggcgctgagcttctccacctgacaaagttggtgtatcttctcccaaatgtaagtaatccaagcctacttcttttaacaattttagctctcgttcaatcttaggcactttaacaaaaatcggtagagcctcattaacatctagatttaggacatcaacaattgacagatcatgccacttcaccttttgtacatcttgattataacgatcgccatgacaggttgaacagacttgttgcatatctggtaaaaattggatgtcaagagtcacaattcctgtaccaccacaagtaggacaagctccttgtttattattatatgaaaaccaacttgatgtataatgcttctttttagcgagtggctgactagcatataactttcgtaaattgtccataattgaagtataagttgctacagttgaccgagtacttttaccaattggagatgcatcaacacttactacatttgaaattgggctagaaaatctactaatttgttttggcaatttttcactttggctttttgctataatagcgggtactaaactatccagaatcaaactagttttaccggcacctgaaaaaccagttactgcagttaattggtttagtgggattttagtttttacatcatgtaaattaaaatattgctttacttcaaataaaatagaatcggaatttattcgagtggctggctctctggcaagtagtttagcactaccatccaaatatggtcgaattaaagaatgttgatcatgtttgattgcagtaattgaaccttgatccaaaatctgaccaccttttttacctgaacctggaccaatctcaattacctcatcagcggctttaataatgtcaacattatgatcaacaactactaatgaattgccctgagcaactaactttcgtaaaaccttaattaatcctgcaacattagcaggatggagaccaatagaaggctcatccaaaacatataaaattccagtagtttcagtacgtaatgttcttgctaattgaattcgttgcaattcacctgtcgataaggtatttccacttctagccatagtcaaatagtctagccccaagtctaataatggttgcaaattatccaaaaactcctgaataatcgaatgagccattttatgcatattagttggtaaagttgcttgcacatctttaacccaggtaactaaatcacctaactgcatttcggccacctgattaatattttgcttaccgaccagctgttgtaacaattctggtttcaaacgactaccatgacaaagtggacaagtcgaataagtaaagaattcggctattcttttttgcgcacgttccgatttgctactctttgctgaacgatagacagcttgccgagcattttcatataaggcattaaaatcatgaaataccctgccagttcctgataaaaagtccattttatatttcttttcaggaccatttaagacaaaatctttttctttatcagtaagatctttataaggaatgtcgatcctaacaccagcatgttctgcaacgttaggcataaagttccgtcctggcaagctccaagatgcaactgcaccatctttaattgacaaattttcatccgtaatcagtttagattcatctagttgccgtatcttaccagttccgccacactcagtacatgcaccatctgaattaaaagcaaattgttcggcacttggtgcataaaattttacaccacagactggacaagttaattgtcccatttgctcacctgacatactcattgcctttgcaattgccaaacttggcttcaaatggtgtccattaggacaaactggagaacccaaacgagagaaaattaagcgtaaaacattaaaagtctcactcaaggttcctactgtagctcgctcatttggtacacttggacgctgccgtaaagctaatgcggagggaatatgtttgacgctagttacatcaacctgatttccctgtttaattcgcctacgcatataagttgacagagcatcaagatagcgtcttgaaccttcttcataaagaatccccattgctagtgatgattttcctgagcccgacagtcctgaaattgctacaaatttattcaaaggaatgtcaacgtcaatattctttaagttatgtactcgtccgccacgaacttcaattttcgttggaatcgtcattaaatatcccctttccattatttagtcattatctcttttaatctataatcatgaattaccaacaagcaaaccaatttttggaaaattatgacaaaattactattaaaaatatgtgttatatgatatattataagtagataaagtaagcgcttacttttgaaagacatagaaatgaggtgttgttgtgatattgattaaagaaaccgttgttttttctttttatagatataaaaataccacatatttagagacacccatcaagctaggagtcatgcgtaacggcgcttgattcgtgtcctaaataaaaatgagggttacattttgtaactcttatttttgttcttaaaatacaaaagaaaatcagtacaaaacacggagtttgtactgatttttaatattctaaaggttaattatttaacccaatcgcggacttcactatcatcacgtgcaacaccaacaacattcagaccattagcccattctttaaagtgactgacataagccttatggttagtgcctgctgaggtaaagaatgatgcaacttcaccacggtagtttttcatcttttcaagtaatggcttaattggagttgcaggatagcctgaccaaacagggctaccgactaaaatcaaatcataattattaaaatcgatatcatccatttgaatttcaggataaggaaccttaccttgaatttgatctagagcaatatcgttggtcttgtacatatctgaatcaaaagcgtcaggagcaacagttacttcctttaattcgctgttttcaatttctccgttaatctttttagccatgttcttggtattgccttcccaagaataatagataattaatgtttttttagccataaatttagtccttctttcatttacatttattgtaataaaaaaagaccggtttgaccaatattttaatacgcgtggtgctagttaaatcgttttagttaataactgaaaattgaaagcaccaaaatcaagctcaagtcctgtcactattgagctttcttagacgtaattagtttttatatgatctgtttcagtgcaatttgtatgaatcgtggcagttggttaataaagtcattgattacttcatctatcttttcaaaactattctgtttaagctcttttaattctgaaattaagtagaccaatgcatctacgaatctaatatcaggtaaggattcgttcattagatagaataaatctccgattgtcttatcatctgtattttgtctttcctgccaggtcaatagatcataagttattgctgtaactgcgatatagccacattggccatcatagctttgaacttgagatttatctaaagcaagatattgcttagacgtcttaaaatatgtttcaatttgccatctacgaccataaagttggatgatttcttcagggctaagctttgtctgagtagtagctaaaaccaaatacttgttcttgtttccacggttggagacaaagacgagctttaataaaaagctatgtccatgatattgagcctcaactatgcttgaataaagataatgtttctttttacggatgtttgaagcagccaaacgatcatacaagtctttaacgctatagcggcgatggcgataaatgtaataaatctttgaactcttcttgatcatgccaagtccatctaaaccgatcttctttaaaatccaaaacattcttggagaagaaaaccaagaatcgaataagacgtatttagcttctactcctaatcgtaaggcttgtctaatcaactctacagttacatcattcatctttctctgagcttgatttctccttttaccagaaattgaacgttcatcagcagtaatgggagcagctccaatcatatttttcttggttttggttgacatcaaggcaaagttaaccggcaagaaggtattgccatcgctccagcctaaagttaaaccacgatatccgttcaaatactcatgcttgtcatggtcatagactttagctagcaattcggtctttttagaaaaagaccgagccatcagcgtatcgtcaacgataaaagcaagtcggcgtcttttatcgataaatggttttaagcagccaatgagccgggctgcaatcaagcataatagtttttgccagttgattcttccatcgttaagtacattgcgagcagttctaacggaaaaacgtttgtcatccttagctctgaataaagaaagccgagcaaaatgtactgacatcagccaagagataatcatggttaatgaaacggtggatttacgcttaaaattgacttgtttagttaacttagctagaccaattagattaataaatgaagaaattaaggatttagtatcattttctgtgtcgatttgttctatactgttcattgcgcaggatctcctttactttttaggtcgacacttaaagtataacgcagagagagcctgcgtttttatttttgataagaaaaagccaagaggcgcggggaaggagcgttaatcttagctttcaagttttagttaataaaaaagtccaatcttgttagactcaacttgtataataatagaaaagagcctgatctgattgaactgccttaagcttaagcgttttagccaccatttacaagttagttttaaagatttagtgataatttgtcggcactggtatcgtttgtatgcaccggctgagtttactcatcggcgaaatattgatcaaattaaaactacggacagtctgattttggctttacttatctggcaagctaagacaggaattgaatcacaaagaagattctgtgaatgtttcaattgtttatcacactcacgttttaatcggcgttcacgtcagctattgcaattgatttatcagatacggcaagaaatgaataaaaaggttgacctgaatggacagttcttgatcattgacagctttccggtacctgtttgccaaccaattcgaaactatcgtgctaaaatttttcgcggttatgccaacattggttataaggccaccaagaaaatttacttctatggtttcaaagttcatgccattgttagcgatgacggttccattcttgattatgtcgtaacaaaagcatcagttcatgatgccaaggagacagttgaactgctggaaaatgcccatccatctaattactatcttcttggcgacgaaggctatttaggcaaagaactgcatcaacagctaaaacaaatgggttatgaactttggacaccatatcgtaaaaatatgacaggagctaaaaagcacaatgatcatcaattgatggctattcgcagaacaattgaaagcgacttttcgcttctgatctattacaatgccgagaacaatcgagcacgtagtctgataggctttcaaagccggttggaaattgcaattttagcttataatttggcttattgtctagaacgatttaactagcaccacgcgtattttaatattattattttagctattttccttttcttttgattatttccatcatagcctgaccatactttttcatcttcgcttgccctacaccacttacctctaaaaattcactttcattttgtggtttaatttgtgccatatcgtgcaaagagcgatctgaaaaaatcataaatgctggtactttttgctgcttagctaattccaaacgcttttgtcttaaagcttcaaataaagtatcactttcttcaccagcatgagtagtagttactgaaatcttagcaattcgccgtttgactacagttttgccatctagtacatcccacccatgattagttacatgcactagtggatatttgctaccttcaacttctagataacctgaagcaattaaatagtcaatcaagcttatagcatctttttgcttcattcttagagagccaaaagacttatattgtgtagcattcatttcttgcatgcgctgattttttgagccaatcaaacattgagcaactatcgtttttccaaagcgaccatctagttcataaaccatactaatcactttttgagcatcaatggtaatgtcagtcaatttatcctgatttagacaatttgagcatttaccacatggcggacaatcttgaccaaaataacggacgataaattgctgcaaacattcaccagtattagcataatcagtaattgtttgcaacttacgatattgcagttctcgatatttatcatccgcatctgattcatcaataaagtagcgatattgacgcaagtcaccaggatgatagattaaaatcgcttcgctttcttccccatcacgacctgcccgacctgcttcttgatagtaactttccatattacgggcacttgaggcatgaatcacaaatctgacattacttttatcgatccccattccaaaagcattagttgctacaattacttgaaattcatcaaattgaaaagcttcttgtacttgacttcgttctgaagaatccattccaccatgataagcaccaacagagattcctttcttagccaaataatctgtcaaactttcaacttttttacgtgtattagtgtaaataatccccgctttatcctgatgtgccttaatatattctgaaatatataatggagtattttgtggtgagttgaccactttaaacgatatattagggcgagcaaaagaggtaacaatcatattctccttgggaatattcaattgttcacaaatatcatcttgaaccgcaggcgtggctgtcgctgttaaagctaatatatttggtctgctttttagtgaattgattccatctaataattgacgataagcaggtcgaaaatcatgtccccattgtgaaatacagtgtgcttcatcgacagcaactagatcaatatctaaaaaatttaactgatatctaaaataatcaatcgctaaacgctcaggtgtaatataaattaacttaattttgccttcatatgcctgacgtaaaattggattaacctcttcttgcggtgtagtagaatttaatgctgccgcattaattccattttgctttaaattatcaatttgatctttcattagagaaattaatggtgaaataaccaaagttacaccgggattaatcaaagctggtatttgataacacattgattttccgccaccggttggcataaccgctaacacattttgcttttttaaaactaaatcaattacttgtttttgacctgggcgaaaatttgtatagccaaatgtatcttttaaaacttcttctggattcataaacttatcctaactagttaaattgctactttttattctaaattaacaattcaccccaaacaagataaaaagattcacacttttaaataaagaaaaatgtgaatcttttagagttaaatttacttataaaaggtttcttctactgcatgagtaatcgcaatcttatcatgagcataggacaaaccgccctgaatataaagcatgtatggttcacgtaaagggccatcagaagaaagctcaattgttgatccttcaacgaaacttcccgaagccataacaacttcatcttcgtaaccatcctgatgatatggaattgggtcaacaaatgaattcattggtgaatagtgttgaatagccgcacaaaattttaccatcggatcaggtttaccaaaagtgacagtttgaacaatatcactacgtggatcactccatttaggtgaaacctgcatccccatttcttctaataaggctgcagtaaagaccatacctttttgagcttcaccagtagtatgagctgccataaagaatccttggtagatatcacgcaaataaccccaagttgcgccttcaccttttccagctcctggcactgtcaaccgtgaaccagcaccatcaattaaatcctgccggccaactaaaaaagcaccgccttttactaaacccgcaccagcatttttataaagagaaccagccattaaatctgcaccatagaaagttggttcttcacattcagaaaattcaccataacagttatcaatgaaaatattgacatcgggacgaacttccttaataaacttgagcattggcttgatcttagccatggtaaaagtcttacgagttgcataacctaatgatctttgaattgccactactttaattgaaggatccatgatatcttttttagcttggtcgtagtctacttccccattcttcaattcagtagtcttaaaattaattccccattccttcatgttaccgggcttattaccagcaagaccaattacttcttgaatggtatcatatggcgttccagttaaataataaagggtatcccctgggcgaagcatgctgaaaagaccaactgtaattgcatgagtacctgagccaaattgtggacgaactagagcatcatctgttttaaaataatcggcataaatatcctcaattttatcacgacctatatcgtcataaccatagcctgttgatggaactagatcttcttcaccaacatgatgttttctaaataggtccaatacacgttgttgattatacaaaacctgttcatcaattttttctaaacgaggttggatcattttttcaactttagtcactttatcgtttaactcttttggtaaattctctttccaagaaaaactcatttttaactccctatttatttttgattacttctgcttgtacgcataaactaccattattattttcgctcagatatactccctgaatctctggcacaaaaccaggaaacttttcaatagcatgcgccaagacttcaaagtacttttgatctaccgttccccacttttcaccgggtgcaacaatgaaaacacctggaggatatggcaaagctccttcggcagcaattcttccaacaacattttctaggttgaccagttcattttgatcttttttaaaaagctgatcagctgtagctggtgtcatttgatagtcttgcatccctgatttagaaaatagcttttgctgtaatacaaaagtattattttcctgatagtactcatgcatttcttgacacaactgtttcagggtatagccttgataacgctttggatactcattatataaaaccggcaaaacatctttcattaagtcatcttctagatagtgtttttcaaaacttaaaaaagcttcaagtaaagtatctagttctgcttgactatctcccggtgtaagtaaaaacaacaatgaattcaaatcatttttagctcgaataatatgattttccattaagtattctgccactaccgcgcctggaatacctactttctcatattttgcatttttaacatcaattccgggagtttttaccgtaatcttcaatgggtcaatcattgcttcgcctggaaccattttacggaaaccgtgccaatccgtattttgtcccatttcccaatattctgcattggtagccaattcatcagtcgaaatttcggcaaaattgtcaggaactaatggcttaaatagcttagactttttgagtagttttttccgccattcaattcccattcgcagagtttgatcccaccactttttatttcctgctccagcagtaacgtaggaattaactgttaatgaagcataaagtgggtatgcataactggaagtaacaaacttcagataagcatgattaaagtgcttatgatcaacatatcgtttttgtcctttaatatgagcatccttttttagaatctgtgacgcttgagccatacctgcttgctgtttatgtaatgactgagtaaccaaaatacctggatcatcaggacccaagttaagtagaagtggtgataaatgtctcataattggtacgaattcttcaaagccgccccaggcacagtcaaacagaacataatcacaaagtttaccgattcggtcaataatccattgtgcatcataaaagactccatcataggtttctgcttgtacgattgctaacctaaatggacgcttagcctttgcctttgccggatctatcttagctacttcagctctaattttatcttcagttaagaaggctggatccatttctccaattagtccaagtgcatttcgatcagttggaatgtagaccggctttgctccgctcattaccaaggcagaattatacaaagatttatgattatttcgatcaaataaaactagatcgccttcagataaaagtgcacttgcgcaaatagaattagctgaagtcgttccgttggtacagaagtaaaccttatctgcatgataagttttagcagctttcttttctgcattaagtggcgttccagcatgcgtcattgtatcccctaattgaggaacagtatcacttgtatcggcaaacattagatttttaccaaagaacttattaaaaactactccggcaggatgtttatcataatattgcccattatggtgacccggtgtagtaaatgaaattggttttgcttgagcaaaattgatcaagtcggtcaaaaagcctggcaccatttgcttttcatattctgtagctttcggagtgacttggtcttcatctacctgatcagttactttaatcaatggaatcggaaaaccagattgttctcttagagcttctgcttgttttattcctaatgcatcatcatttttgacaacaattgcggcaagttcagcactattttgtacatcgccaattggaattgacgaccaacctttcatcttattaacattgacgccatttccaatggcaattttcaaaaaatccatcctttttctttccattttgtccacgaaaccgttttacatattgcaaaactttaaaaagtctttataatttttctacagtatagcgtactttttgcattctttcttaaaatacgctacagctgaaattattatataaatattggaggtttttaacaagtgcatttgccttgctcgcctccgagaacagctatgtcaacacaacaataaaatagcttaacttggaggaatttttatgtcagaaacaatcgaaacagtcaatttcgaacccgaaaaaaaacactacatgtcatggccggttattgcattgatcgacttcgtaacgattatcagttttgaaaatattttttatccatttcaaaatcaaggcttatcagtagttgtatcttggattttcctactcttcgcctacgttattccttatgcattgatgtctagtcaaatgggcctaacctttactgatcaagccggtggattggcatcttgggtacgtcattcatctaacgatacactgggctactggacttcatggatgtattgggttcaaactgttccttatttggtcgatgtttctaattcagttattgtgtccttttcatggattattttgggcaacaatactttagacaagcatatgtctactttttggtttgggattttgacctttgtcattattcttgcctttattttggttgaaaatgcaatcaagaattcacttgaactactatctttaattggtggtggtgcaatgtttattatgtctatgctctttgttttacttgctgtttggtcagttatgcatggacaccatattgctacccaaccatttaacttggccgcatttaagccatcatttagtttacgttacttttctaccactggtcttctaatcttcgccatgtctggtgcagaacttgctgctccttatatcgtacaaatgcgcgatccaaaacacgaatttcctaaagcaatgtggatgttagctttgatgactggattcttgactatcttcggtactttggctttagcaatgtttttcaatgctcatcatattccacatgatttcaagatgaacggaccttactatgcatttcaactactaggcgaaagccttggttggggcaaagtattaatgtacatctttgctgttgttcaagccctctttatgatggcccaattagcagttttacttgatgcatcaagtcgtgtctttgccggtgacgttgccgacaaattcatgccaaaatggttaactgggaaaaaagacaaaacaggtcgtccagttcactcgtacactttaacttgtggtttagccttattcttgcttttacttactgggactttgccaaatattaattcaatttacaattggcttttaaatatcaatggtattatttccccatacaagacttgttgggtattcttcgctttcattatgttacggatgcaccaagagaagttccactcagattatgtcttcattaaaaataagactggtgcccttataatgggctggtggtgcttaatctttacctttatctgtgctactttaggatttattcctcaagaagcagaagcaacattcggtagtgcagcctttaatcaccaattaattatgaatattattacagttatcgtactctttggcttaggcttcttactaccatacttaagaaaacgcgaagaacgtaaagaaatgaatatataaaataaacatgcttcgatcagttcgaaaatcgaggcatgtttattttattattctaagatttcaacctgcatcttactaggaacattaacaaagtcgaattgtttttgaaaaacatgatcaaaccgtaaatcataaacagaaccaataattggtgttaatgcaaaagctcgtaaagtgttcatatctttagttttattagcataaatatgatgcatttgtggtttgattttataaattcgttctaaatattgtggacttacctcatcaacatagccttctagagtgaaaccaatgctagtgagagtttctcttccgcgcaaagcggtaattgaaactttattgtgtcccttaatatggcgataaaatgacttctgattagtcgttgcaaaaataagacgaccatcttcattaaagtcaatatcgataatattggtatgtggatcaccattttgatcaacggtaccaaaaattactgaatggaaacaatcaacgattagatctaggaattcgtcgttacttaaattacgatcgagttcaggaacatgttgtctcatattaatctttccgtttctatatactttctgtaatttttatctatattatttcttatagtgtacatgacacaattaactaaaaacaactttaatgctcattattttcccattttaaatgtataattgtttaatattaatttttctggtaaaattttagctaacaaaaaataagaaaagaggcagaatatgaatatagattataagaaattggtccaagccaaaaaggacgacattcttcgtgatcttgacgaattaatcgcaatcgactcatctgaggatttgaataatacttccgaagagtatcctgttggtccaggtccagttaaggcaatgaagaaattcttatcgtttgcacagcgtgatggtttccatatcaaaaatgttgacaattacgctggccgtgtcgactatggtactggtgaaaaacgtttaggcattattggccacatggacgtggttccagctggtgacggctgggtaactgatccttttaaaatgttaattaaggatggtaaaatcattggtcgaggttctgccgatgataaaggtcctgccctagctgcatattatggcatgcttttacttaaagaagctggatttgaacctaaaaaaaagattgattttattgtgggaaccaatgaggaaactaattgggttggcattgattactacctaaaatatgagccaacccctgatcaagtattctcacctgatgccgaatttccaattatcaacggtgaacaggggatctataccctgaccatgacctttaaagatgacaataaaaagggatcagtagtccttaagtcattcaaggccggcattgccgaaaacgtaactcctcaaaaggcctatgcaactattgttggtagtgatttagccacaatgaaggaaaaatatactaagtttttatcagataataaacttgaaggcgaattcactatttagggcgatgaagctaagattgaattaactggtcaaggtgcccatgcatctgcacctcaagttggtagaaatgcggctacatttttggcagtatttctagatcaatttgattttgctggtcgcgatagaagctggcttcatttcttagccgatgttgaacatgaagactttaacggcaaaaaattaggcgttgctcatcatgatgacttgatgggtgatctctcaagtgctccatcaatgtttgactacgagaaaaatggaaatgctgttttgaaagataatattcgctatcctcaaggtactgatccagataagatggttaagcaagttgaagaaaaatttggtgatatcttaactcaaagttttgcttcatttgaagaacctcattatgtacctggagacgatccattagttcaaaccttgctcaaagtttatgaacgccagactggtaataaaggtcatgaagtcgtgatcggcggtgggacttatgggcgtttatttaagcatggagttgcatatggcgctcaacctgaagatgctccaatggttatgcaccaagcaaatgaatatatgaaggtagatgacctaattaattcaattgcgatttatgccgaagctatctatgaattgaccaaggacgccgaataaaaatttttacatgtatcaaaaaagcttatatactgatcttgttttaatgcagtatataagctatagaaagttgctagtgtcatatatcactagtgacttttttatttttccaataaaacttcttcattatttttcttagattttagccaaaaatgatgtcccaagtaacaaatagctacaaaaggaattgtatagtacaatgctactctttgagttggatcgaaccagattaacacacaagaaagtaggcttgatataaatgcaaaatatggaattacaggataccatggggtcttgtacttcaattcactgagttgatgacctgagtttaaaaatgcccttctaaacttcaattctgaccatgcaatcgccgtccaaacgaatacaacagctaatccagaaatagaaactaatactagataaaccgtcgaggcagcaactttactagaaatcaaagcaaaaattccgtctaacatacttactactaatgacaatactggaataccacgcttattagttttggtgaatgctttaggaattgttccttcgttgcccaacgaccaaagcattttagttgaagcatacaaacctgaattggccgcagaaataattgcagtcaaaactacgaagttcataatatttgcagcaaatggcacatgaattaggtcaagcacatacacaaatgggctttgagttactccagccgtatgataaggaattaatgcggccataactacaattgagccaataaagaagataattaaacgccaaagtgttgtcctgattgcttcaggaatagctttctgaggattctctgcttcaccagccgtaatgccaataagctcagttcctgaaaaagcaaagtttactgttagcattgttgtaaatactccaccccagccgttggggaaccagccatttttataaaaattaaccaatcccaatgtgcttgataaactttgctcaactgatcaatcaaagctgttgcggtccataatttattattagtatctacgccttgtttttccaattcatacgacattgcaccatctaggactaatcccctatttttaatctgttcaagcaaacccatttttttcatgctgtcaacattattttagtaaatttcctaaataatagccgcaataaactagaaccaagccacccagatatgatgacaccgcgtagaatacaagaccacgataatttttactcttataaagctcaactaattctgtattcatagtggaaaaggttgtatagccacccattactccagttcctagtaatgcataaataaaagtgttagcaccaattccaaaaatcaagcctaaaattagtactccagttaagttaataaacaaagtcggtgtaggtaaattagaaaatttattaccaatccattcccaatgctttttaccataattagtaatagcataacgaagcatagctccaattgatgcaccaattcctgcaagcaaaaaattcatcgtgtattcctttcctttcttactaattgaccaacttttttaccaattttcattcctaacatagcaaaaaaaagccaaaaataattgagctaaagtaataaattactgcttcgattggcaaattagcctgcatattttttaaaacatcaagattaaaagttgaaaaagtagtaaatgcacctacaaagccagtacctaatccaactacaagccactgcctaatctctttagtttcaataaaaaagtaggtgaaaaacgctaataaaaagcaacctatgacattaccccaaaaagtaccataatagctgaagtttgcatttaaaccagcacgtgccataccaccaaaaaaggcgaaaatagcgatactaatgtaattaataaattttgaattcaaacagattcctcccacaaaaaaacgtctactttacccctatcggataaagtagacgtcattagattttactcggttaatggcgaacgtcatcgcctattcagttgacagttatcatcatacgacttttctgtttggttggcaagttgtattgtgtgcgtgtcgcaaagcgacacgcagtttgattatttaataaaaaaatttagtaacaacgtgcttgaaataatgtataattatttttaacgaatgtttgaaaggagcctcaatcttgacttttccatatgaagataaatttcgcatttactgtaaacaacaaaagaaactagccgattcaactatttctctagcctgttcttcaatttcaactttttgggattattattctggtagtttagatgctactgaagcaaatgtagaaaatgttacaactggagatatacgtaactttttagattcacttgaaaataaactccatatgaaaagtaatacagtaaataaatatcttagtcacataaagatgtattttgtttttttgaatgaatatggctacatcattacttatccattgctcactttacgtggtaatcgcttcaatcgtaagcaacactatgttattggctgggaaaatcatttatcagaattaattcaaataaaaaatattcatcctgaaactatcaagatgatggctgctattgcttgtggttttaagccaaaagaaattatgattttgcatgtaaatgaattgttggtaaaagttaaagaaaatgatgtcagagaatatatccaaaatcacactaattttgccaataacgataatccctatctgtttgctcgccgcgatggcaaacattacgcttctgattttaatattaacccaaaaattgcccctgaccgttcaatagtcggcatgccattaactacacataagcttcggatgtcttatgtctactctgttttgtctaattcaaaattaagagaagcggattatattgaaaaattacatctttcaatgaaaactttaaattactatcgtaaaaatatgacactctatgtagaaaccagtaaatttgaattaaaaaaataaacaagcaaaaacgactacccattttgatatagtcctactttagtagacagtacaaatatataaaattgtactatctatgaaagcaggactttttgtatgtctagaaaaagtaaatttagctatgaagctaagcttaaagcagttaaacaatacataagtggcgaagcatcacctgcttcaattgcgaaagttttaggggctggcaagactacactgcgccaatgggtatatgcatttaaagatcatgggccagaagcattaagaccacataaatataatcaaagatacagtaaagattttaaactcaaatgcatagctgcctatttaaatggcgaaggctcatatgattatctaacaaataagtttggtttgcgaagtgctgcacagttaaagcagtgggttatcaagtataatagtcatcaagaactcaaggactacaatcctattctggaggcttatatgactaagagaaaaaagacaaccctagaagaacgtaaacagatagtgaaatactgcaaggatcatcaatggaactacaaggaagcagctcttaaatttggctgcagctatgcccaagtatacaactggtcaaaaaaatacagcgcaaagggaactgacggcttagcagataggcgcggtcatcgtttaaaagaagctgagctatctgaaactcaaaggctaaagcgtgaaattgaacagcttaaaaaagaaaatgatattaaagaccaagagatagccttcctaaaaaaagtgaaggaattagaaaggatgtgtttgctggacagccaaaacaaagacaaatagcacttaaacaacagcagcgaaattctctttacagtttgatcaaagaatgtcaccgagaatataagtggtcaattgaatggatgtgcaaacaagccaatattgcccggtcagcctactacaaatggcttaatcataagccaagcaaacgtgaactaagagatcaaaagattcttaagcgtattaaagaaatagctgagagcaataacagcctctttggttctcctaagatgactttggctttaaacaatgagctagcagacggtgaggccaaaatataccgtagaactgtggctcgcttgatgtgcgtgaatggcatctatactagcaaggccagatttaataagaggtatcgctatcaagctgctagaccggaagaaactgccgaaaatctattgcatagagacttcaatgccactaaacccaatgaaaaatggtgcactgacattactgaagaaaaaattcctggaacaagtcaaaagatttatctctgtactatctttgatctatatgatcgtttccctgttggctatgctttaagcaagcgcaatgatacagccctagttaacgctgctctgtcaactgcttggaaaagagagcccaatagtcatgcaatgcttcatagtgatcgaggatttcaatttaccaggatgccttttaagcatgagctagaagaacatggcatgccacaatcaatgtctagaattggccgctgtattgataatggcccaatggaaggctggcaaggtttaattaaagaaatgcgagaagttctttatccgaaggcaaatagctatgaagagatggaaaaagcctttaaagcaagtattgaatactatattaattatgatcctcaggagcgcttcaatggcaagagcgcaggtcaggttagaaaagaagctaagaataatccagagaatataatttcatatccaataaaacaagataaaagatataaagacttttggaaaaagattgatgaaaagaaaaatcagctcgcacaatagcgaactgattaatcaaattaatttatatatttaagctgtctacttgacacggtacggatcatttcgagtagtcgtctttgtttgttgaaggtgaaatttcaacaaatctatcttagtcagaacttggagttatctattagtaccagccatttgcttgccagaaacttttagcagcgctccaagagccatatctagatttgacataattatccgctacacgttcttggttagcagctgaataatcaccattcaaataagatgaagaaagttgatacttacctacatattggccatttctagcactgtatgagccaccagattctttgcttgcaatccatgcctttgcactagcttcggaacctgtcgcggttgatgaatatgaactagttgttgtcgtcttaggtgtgtagttcacatttgaataagtgtatgaactttgactttggctagcttgtgtagtttgttgagctggcgtttgtgtttgagtgtaggtattttcttgtctagcttgagtattttggctagtagtataattagttgccaatacccattgatttaagccaagatcataccacttctgtccctttgaatcataagcagtttttataatcttccagttagtacctgcagctagagtttgaccagttgcaactggattttcatagttattgtaaacggtagtagcttgtgtagttgtatacactgctgcatcattttgcacaacggcagcttgtgcttcattattatctagttgattgattgcaccaatacctgcaagtgataaagcagcaacagcaatagtcttagttaaaatagatttagttttcaaaaaacatctctccttaaattaaaacgtcaattactattcatcatttttgttttattattctcttgcaattgacattttatataatacctgcttcgagttgcagttccatcacagtcagatcacacaatgattaaagaaaaatgttttttcgtaacagttggaaatatttttaataaatctagatttctctgcaatatttgtaaaaatcatgcaatatatgaacaaaatttgacgacaaaataagcatccctacgccataaaagatcgttttagggatgcttatttaattaataatctaattcttgatccatacttgcaggccagccaccaataccacgtttttgatcaaggccacgcaatgtctccatctcttcagcagtaaattcaaaatcaaaaatatccaaattatccttcatgtgtaacggattcgtcgagccaggaatagtcatgatattttcttgtaccaagaagtgtaacgcaatttgtggcactgtcttattatacttctcagccaaagaaagtaaggttgggtcattaaataaagccttcattccttcaccgagtggtgaccaagattcatgtacaatattattttcaattaaatatttatgcattttcttttgttgcttaaagacagacgtttcaatttgatcaactactggcttagtatcgaaattattcataatttcatttacttgatcatggttgaagttactcagtccaattgaacgtagctttcccacctgatatgcctcctcaagtgcctggtaagtacctaaactatcagacataggccagtgaataatcattaaatcaaaatagtcttgctgggcgtgaattaacgattcatcaatcccattcttcgtctctctataaccacttgtttgcgctttagtggtcaaaaaaatgtcttcacgtttaatgccgcttttgttaatagcattgcctacttctgcttcattactgtatgcttgagcagtatcaattaaccgatatccagccttcaaagcctcgacaaccgctccttcagtaattctaggctgaattctatatgttccaaagccgaagattggagtttttacaccgttattaaaagttaaatatttcatttttattcctcaatattttattcaggatcagatgcagagtgataagtaatactaaatccagcttgatattccttacctggctccaaatgattcataccatatttgtgctctagctcaccatcagcatcttctctatctgcaattccccaccatggctcaatgcatacataattagcggtatttggatattgtgaccaaatgccaacatatggtgcatttctagtccaaacattgatgtggaacttactcttatcagttctcaaagatactttattgtcatgaccatgtaattcataaatcaaggcatcatctttaaatagctcatcacttaaaccaataaaactatcagtcgaagctagagaacgattattccagtcaagatatgctcctttaagtgggatttttaccctagcaatagatggatgcatatcgaaataataatcttctttctcttccccattatttactggtaagttaaatccagggtgaccacctacaccaaaaatcatagtttcatctgatttattaactacgctaaagttttcttccaataaattattcatcaaattatagttaactctgaattcaaatttaaatggatacatttcacgcgttttttcattatctttcagtaagaacgtgatactttcttgtgtatgattctccacttcaaaatcacaatcacgggcaaaaccatgctgacccatatgataggtcttaccttgatacttatattcatcattcttaagtcgccctacaattggaaaaagtacaggtgcatgtctgccccagatctctggatcagcttgccacatatattcttcaccggtatgagctcctttaacgctctgaacttcagctccgtgatccgaaatcactacttcgatcatattattcttgattgtgtaatccataactaaatttccctctacatatcaaacagttaaaaatcataatgtaatcgcttaattacttatattttaacattaatgcgtcaataagccagaataaaaacaaaagaaaaaagcattcaaactttgaattgaatgcttcattcgtgattctttgatcaattagagaataaatttagttaagtctttattcataataatatcgcctaacttatcttcaacataggcttcagtaactgtgatttcacccatttccatatcaggcccttcgtaaagaacgtcttctaagagcttttcaagaatagttgaaagtcgacgagcaccaatattatcagtgccttggttaacatcaaaggcaatctccgcaattttatcaacggcttcttgggtgaaaactaacttaatgccatctgccttcattaaagcaatgtattgcttaagcaatgaattttgtggatccttcaagatcttgacaaaatcgtccttggttaaagcgttaagttcaacccgaattggaaaacgtccttgaagttctggaatcaaatcactaggcttactttcagcaaaggcacctgcagcaataaacaaaatatgatcagttgaaactgggccatattttgtatttacagttgagccttcaacgattggtaaaatatctctttgaacaccttcacgagaaacttcaccagaattacgtttattaccagcaataattttatcaatttcatcaataaagataattccgttattctggcttctttcaatagcatgttgatagatagcgtcatagtcaactaacttacgtgattcttcttgaatcaaaacttcacgtgcttcttttactgataaagtacgcttaacctttttcttaggcataagatcactaagcattgagcccatatccatccccatttgacccatcatgtcactcattgggttggccttaggagcttgttctacctctatggtaacttcgtgatcttcaagtaagcctttagctagcttttcagccacatccattcgtttgtttcttacatcagcagaaacatcctcttcatgatcttcttcgcgattattttctcccatcaacatagacatcatatcttgcatttgctgcatttgattttcacgacgttcatgtttctctgctggagctaacaaacgaactaattctttatttgcttctttagttgcttgagtctttacacgagcaaattggtccttttcttccattcgtacggcttcggaaaccaagtcacggaccattgattcaacgtcacgtcctacataacctacttcagtaaacttcgttgcctctactttaacaaagggagcttctacaatatcagctaaacgacgagcaatttcagttttacctacaccagtaggaccagccattaataaattcttaggcgttacttcacgttgcatttctttagataactgcattctacggtaacggttgtaaagagctatcgcaactgattttttagcttcatcttggccaataatatattcgtttaaaattttaactatttcttttggggtcttaatagccatttccttcactcctaaatttcatcagtgacaattttatcatcagtgaaaacatcaattcctgaagcaatctttacagcttcatgtgcaatttcatcggccttcatatcttttgcgtgtcgagtcatggcaatcgctgcggcttgagcaaaattaccacctgaaccaattgcaactacgttttcatcaggttcaagtacttcaccattacctgaaattaaaagtaggtctttgtcatcaaaagcaatcaacattgcatttaatttttgtagagttggatccttacgccatgcttgagccatttccacggcagcacgacgaagatcgcctgagtagctttcgagcttgccctcaagcatatcttgaaggctgactgcatcagctacaccaccggcaaaaccaattactacacgatcatggtaaatacgacgaatcttacgcgctgttgccttggcaataactttttcgcctaaggttacttgtccatcaccggcaattgctgtttttccattaaatcttactgaacaaattgttgtcatgttaaacctcaactttctttattacgaggaaaatatttttgataatctgattttaaatgagccattgttacatgagtatagatttgcgttgctgatagactactgtgtcctaataactcttggacacttcgcaaatctgctccattattaagcatcgcggtagcaaagctatgtcgcaactcatgtgggtgtactttaccactaattcctgcctgattaaaagttttttgcattacagtttcaattccgcggctagtaatgccagttccttgattatttaaaaatacatgctgttcatcatcatttttaagtaataatggacgtgcattttctaaataagcaatcaaagatttttttgttttatcatcaaaagcaacatagcggtctttatttcctttaccgtgaaccaaaattgtctgtaagtctaaatcaagttgattcaaagtaagattactaacctcacttacccgcatccctgtcgcataaaacagttcaaacattgccaaatttctcatcgtcaaaggcttatttcctttcaatgaatcaaaaacctgctttaattcaggctggtaaaaaaattgcggtaattttttctcaccacggcgtaaagtaatacccttagttggatcgattgccactagtttgcggcgggttaaaaagcggtaaaaagaatgcaggctggacatcttgcgcaactgactactacgggctaacttgcgttctgctaaatgttgtagataaacctggatatcacgttctcttactttagtccaacctgggaatccaccattttcatgccaaaacctttccgcttcatgcaaatctgtttgataagctaaaacggttttcgcactataatgacgctcattttgtaaatatgataaaaattgatctaactcactttgcctttggttcattaatctaaaacttccgtcttaaattcatctaaactagcaagaccacgttcactgaccttctcatggcgctcacgcttcttgcgaatcttcttaccctctagtggaggtagcaaagcaaaactagcattcattggttggaaatgtttagcactcgtagtagttatgtagttagccattgagcctaacgcagtatcttttgggaaagccacagtatctttccccatagcttcacgtgctgcattaattcctgctactaagccactacctgcactttctacatagccttcaacacctgtcatctggcctgcaaaaaataatccaggctgctcttttgcctcgtaagaagctgtcaaaacttctggtgaagccatataagtattacgatgcattttaccataacgaacgaaacgtgcattttctaagcctgggatcattgaaaatactcgtttttgttcaccaaatttcaaatgagtttggaaaccaacaatattatacattgaagctgcagcattatcttggcgcaactgtacaactgcataaggagttttgcctgtatgtggatcttctaatcctactggtttaagtggaccaaaaagcattgttttagccccacgcgctgccattacttcaattggcatacacccctcaaaaacatcgctattttcaaaaccatgtaattgcgcagtttcagcgttaattaattcctgactaaacttttcatattgctctttagtcataggacaattcaaatatgcagcttcaccacgatcataacgcgactttttataaacaattttcatatcaatcgagtcagcggccacaatcggagctgctgcatcaaagaaatgtaaactatcagttccagaaaatttttgaatctgtccagctaaagcatcactagttaacggaccagttgcaataattgtaatcccatctttcggaatttcagtaacttcttcttcgtgaacagttacattctctaacccacgcaaagtgtcagttacgtatttactgaaactatcacgatcaacggctaatgctccacctgcaggcacttgagttttgtcggcagctttcatgatcaatgaatctaaatgacgcatttcttcttttaaaagacctacagcattagataattgatttgatctcattgaattggtacaaaccagttccgcaaattcaccagtttcatgagctggagtctccttttttggtcgcatttcataaaggtcaacatgaataccacgcttagctaattgccaagttgcttcactaccagcaagacctgcaccaataactgttacattttttggcatttactcacctatattttctatgttaattgtttttttcgttttcactgtcttcacgataatcaccgttaggacaaagaatcactggaccttttttagaatgcttttctactaaaaagtggccatcatttggacaatttctgccaattggcttgtcccatgagacaaagtcgcattctggataacgagaacagccgtagaatttacgatttctacgtgatttcttttcgacaacctgacctttgccacattttggacaaactacaccgatttctttaatgattggcttagtattacgacaatctgggaaacgagaacaagcatagaacttgccatagcgtcccatcttaatcaccattggtgcaccacaaatatcacaattaaagccagctggttcatccttgatttgtaccttttcgatttcactatcagccttatttaattctttcttaaacggttgatagtattcgtcaacaacatgaacccaatcctttttaccatcttcgacttcatccaattcattttcaagtcgggcggtgtaatcaacatcagtaatatctgggaagaagctttcaattaagccatcaacaatttcacctaattcagttggtacaattgaacgaccatcaagtttaacataatagcggcgttgaattgtatctattgtaggtgcataagttgaaggacggcccacgccattttcttccaatgcgtgaactaatgatgcttcagtatagcgtgctggtggtaacgtaaagtgctgtttgttatcggacttagtcatcttgaccttgtcaccctcttcaagatcaggtaagtcaacattcttttcttgttgattatcataaaccttggtgaaaccagcaaatttcaatttagaaccagtagttctaaaaatcacaccattttgaacaatatctgcacgaacagtatcataaacagctggggtcatttcactggccaaaaaacgtgaccaaatcaatttgtataaacgatattgttccgtagttaggacactctttaatgactccggtgtgcgatatacagatgttgggcgaatggcctcgtgagcatcttgtgcgtcttcttgattcttaaaatggcgttgactcttagctgcaaattctgcaccataattttcatgcaaaaacttagaagcctcttgttgggcaactggtgatgttctcttagagtcagttctcatataagtaatcaaaccaactgttccttgcttacctaaagaaatcccttcatataattgctgagcaatactcatagttctacgagtacgataacctaaacgcttattggcttcttgctgcattgtagaagttgtaaatggggctgctggctgacgccgacgttgccgagcaacaactttatctactacaaagtcctttttcttatcgattttagccaaaacatccttaacagaatcgatattaggcaattctttctttttgccatcaacaccataaaaggcagatttaaaagtttctttacccttagcaaattccgcatcaattgaccaatattcttttggcttaaagttcttgatctccttttcacgatcaatcactaattttaaggcaactgattgtacacgtcctgcagataaaccttttttaactttggcccaaagaattggtgaaagtgaataccctacaattcgatcaagtacacgtcttgcctgttgggcatcaaccgtatccatatcaattgtccggggatgcttgaagctttctttaactgcatccttggtaacttcgttaaaagttactctattcttggctttttcgtcaagattcaatgcgtgcgctacgtgccaagcaattgcttcgccttcacgatcggggtcggatgctaaataaacatccttagccttcttggcttcgctttttaattctttaatggtatcgcctttaccacgaatggaaatatacttaggcttatagtcgtcttcaaagtcgattcccatttgtgacttaggcaaatcacgaatatgccccttggaagcaataacgtgatagtttcttcctaaatatttttcaatagtcttagcttttgcaggtgattccacaatgactaaggtctttttacgtttttttgttgttttacttttcgctttagtaggcattaactgcctccttaattcttattttattttatgggtacagtccaaaaataactaatactttctgaattgtcaaatctttatcttgttaaatttaaaatcaacaattggcgtagctcctgcttcaattaattgattgggacctgcagacaatgcattagtaattggtccaggtactgcataaatatcgcgattttcttgtaacgctaaattagcagtaatcagtgaacccgacttttctttagcctcagtaacgattatgctttgacttaagccggccaagatacggttgcgttcaggaaaacgatacggacgcggtggtgtatcaggcaaatattcactaatcaatagtcccttttgcacaatctcttcttgtaaagcaaaattttgcattggatatgaaaaatttaaaccattgccaataaccgcaattgtttttccttggttgaaaagtgcagccttatgagctaaggcatcaacgccttttgctaagccacttgctacaacctgaccagattgcacaatattaggtaccaagcgattaataacatcttgactatacttagtcggatagcgtgagccaacaattgtaatgatttctttttgcagtaaagaaatatctcctcgggtaaacaataccataggtggtcgataaatttgacgtagtttttctggatatgcttcatcgaaaaaactgattacgtcacactgctgttcaatttgttgtaccattcgatccaactgatcatcctgaaaagcgcgatagcatgcatccattagttcctcagttaattcaatttgttctaattcttcaaattcaatttctgtttcatcagttacctgattagcaattgtcagcaatttaacataaccaatccctttttgcaattttaattttagtagaaattctgtttttttcataaaaaaagccctccactatttattacgcaaaaagagaccattatttttttataaattgaaatttattcaaaaaaatcactgactggagcaaatgttttgcggtgaattggcgtagggccatactttttcaaggcttcaatgtgctccttggtgccgtatcctgcattatgatgaaagcaatattgagggtatattctatcataatcatccatcaattgatctcgaaagaccttggccacaattgaagctgccgcaattgaattcgacttagcatctcccttaatcaatttaacttggggtagatttactggcacattcattgcatctaccaaaagtgcattcggcttaacatcaagtgctcgtactgcttgagccatcgcttgacggtcagcttcataaatattaatttgatcgattacctctgcactttttactccaataccaacactaactgcttccgctaaaattttaggatataacttcaatcgtttctctgggctcaatttcttcgagtcgtttacatctaataaatcaaaatcttgatcaattatcacagcagcagttactaccggtccagctaaagggccacgtcctacctcatcaacacccgctactaattgtcccttttcccagaactttttttcataagaaaagcgacgcaaaaactcttctttttttgctagtaattttgcttgacgcttacgataactaactaacaatttttgtacgccggcccgcggatctgcctcaagttcgttaatttgggcttcagagacctcagatttcaacagctcttttatttctttaattgtcatggtctatctaacgtaatccttccgattgcacccttacgcaatttttgtaacataaataatgaaaaacgatcataatcatcacgcatgccatatttttcagtcattgacaaaagcaaatctggatcagccatatcagcaatttgctgttcaggtaatttagaaaatttaagcaaatccttagcataaaattcacgtaaatttttcaaaacaaataatgctacatcatctgcatgaaaaacactatccttaattgcaccgaaagcagctaatttataaccaacttcctgatcagaaaatttaggccataaaatccctggtgtatcgagcacttgaatattagcatttgttttcagccatctttgtcccttagttacacctggtttgttaccgacttcagccacgttccgaccaactaaacgattaatcaccgttgacttgccacagttaggaatacctgccaaagcaattctaatagtaggatttgaggcccctcgtgcttctagcttctctgttttggcagctgccgccttttttactaaggaaaccaacttctgcatattagtattgtgcaaggagtcaagtgccaaaacatacttattatctccagctaattctgctgcccatgcctttgttaaaactggatcagctaaatcagccttatttaagataataatatgtggtttattaccaactagtccttcaatcattggatttcttgaagcttgcggaattcgggcatcaagtacttccaccaaaacatcaatcagtcctaacttatcttccagttgattacgagccttgttcatatgccccggataccattgaattgttgccatattatctcttctttctaaaattaatcattttcatcatctaagaacaccacttctgacatcaaaatctgtctatataaagccagaaagcctcgacgatattttctctcttgttgtgcaattttacctaaatagtcacgttcttgtctaaaagcatatctatatacctcagctctaaattctttctgatcatcgggtaattctttttgtttaattgtatactttatttccctagcaaaatcaaccatagaagtttgattcatttgtgcccttaaatcgaattttaattgttttcgaatctttttaggtaaatagatctttttcatttgatccatagcatactcaatcattgccacacgaactcgatcaacttcctttctttgatcaaaatcaggtatatctttgtccaagatcatgtgaaaaacaattgttggaacaatcatacttagtaaaataagcgtaatttcactcaccaaaattaaatggaaatctgctacattaatacgtaaatcatataacgtatatgctaaagcaaaagtaactgctccatgaatgccacccagactaaaaatcaatgcttctttattactcgtttttcctttaatagaagggctaaatcgataataaaagtatctaataagcaaattagctaggtataaaattattccgatcaaaatcgcatcaattgtttgttgattaaaatgccttccctcattgaccgaacaatgatgattcccaaaagcaaaaagacaatcccatttaaaatatcaatcagaagttgcgataattgattactgttataaaaaataaaggcattagtaagcctgcttcgctcagattcaacgttatgaatcaatccggctgcaacgactgcaataattccagaaacgtgaatttcttctgctaaaaaatatattattaacggtgtcaaaaagaatatgacatcaaccggcattgcaacaccagcagataaatgatatttggagcgaaaactttcctgacgcaagaaaactaataaagtagccaccaaagctcctagaaaaaacctccacctgcagaatataaaaaattacctattgcttgtccaatccgtaattcttgatgcaagtaccaatcaactgccatattaagcaaaatgatacctgaagcgtcattaaacaaagactcatcttttaggtaaaaagcaatcttcttaggcagcttcaatccatgtgttacagattctgttgctgtagcatctgttggcgttgaaattgcagccagaataaaagccagtggtagagagacccatactaaaatagatcccgaatcccgcagttatagttgccaagataatcataataaccgttaacccaactattgcgccccacgaacgtaaaacattatacaacctagtacgttgtccctcaaaaaatagtaatggcgctacaatcaagcccataaataattccgagctaaagtcctcaattaatgaattagtttgtggtactagtgcaatagccgctccaatcgccattgcaatgtaattaactgatattctcttcaaaaagcgttgttgaataatcgtcgcaaatgctaccgcaaagacaataaaaccaataaaaattactacctgcatttttctacccacttaataaaaaagcccaggcatctatcaggcttgggcttaatacatcattttgtcttcatacattcgataagcacgatcaaaaattgacatacttggtaaataactagcattcaattccaaataatctgacaatttctcataatcttgttcttgcttaggaaaagtcaggtcatgctgtgcattattcgcaaattgagctacgtcatcagctgaatctgcatccctttgcgtcattaaatatcgataaaaactttctcggtaagccataattactccacataatataagatcgcataagcaccattgccagcatgtgttgcgataattggacttgtctctgccactaaaacattaatcgcaggattgattgcacgaattttttcagctaattcttccattaattcaggtgtatcaacgtacgaaatgcctacttctttaatatgctctttattatctgcgatttcttttaacactcgttcatcaaaagcacgtgtaaatttcttacctcgtccttttttggctacgattaacttaccttgtggcatctgaagagcgattctaatattaagcatagtagcaattcgaccagaaagtgcacctaaacggccacccttgattaagttttgtaaattaactaccatcatttccagtttttgagtactacgaatctttttaacatgatcaataatctcagccatgcttttaccagcctgagcatccttagcagcagccaaaacttggaagccttctgccctgtcggttagttcagagtcaataattgtaacattatcgctttgacctgcaatttctgcagcttgacgagcggcatctatcgtaccacttaatgatttagctaagaaaataccaatcacttgactgccatctgcggttaattttttaatcacatcaacaaaacggccaattggtggctgactagtcttaggtaagctctccgcttcattcatcttcttgacaaaatcacttctagtgatatcaatcccatccacatatgacttaccgtcgatggtaatcgtcaatgggactactgtaatgtcatatttttcaacttcttctggtgttaattggacggaagagtccgtcataacttttatcttcgacaacgtattcgccttcaattctaatttgtttacccgatttatgataaaatgtaagcaacatatatactgtattgtatcaaaaaactattagaagaaaaaaggattgattacacttcatgaaaattagcaaactttggcagcaaccagaacaacgatcagaaaggtactaccttctagataatatttttagtgccataactcatgggattggtttcggactagcagttaccggcttagtaattttaattgtaaaggcagctcatacaggcagcccgatgcgagttgttactttcacaatttatggctcttgcctggtactgctttatttattttccacactatatcacagtttagtttttacacgggccaaaaatatttttcaaatttttgaccattcctcaatctttcttttgattgcaggatcttatactccatattcacttgttgcaattggtggagcctggggttggactttatttggcttgatctggggcctaaccatctttggcatcatttactacatcttcaatcgtggtaaacacgtcatacttgatacaatcctctatgttgcaatgggatggttagttatcttgtcaggatcttatttatatgttcgcttaagtccaactggattctggctattagttagtggtggcattgcttacacaatcggcgcgattctgttcagtatgcgcaatgttccctttatccatactatctggcatttatttgttatgctcggttcaatcttaatgtacttttccgttttactttatgtttaaaaaatgtagcagttgaattctgctacatttttctttctattcaattgtagtcaaatagctttcaatcgcttcttgattattctcaacttcacctgaaacaactaactctcgaattttattcaaagtctgccccaattttgcacctggtcgcatcccgcgatctattaaaaatctcccatcaacggctagttccgacgcttttttaataggtaaagccatataacgatcaactaaagcttctgaagaaattggttgaccaacaatatgagcaacgtcaatcgtattaattaatgtctcttcccctgctaagaataattcataatcactaggagcatgactagaaagtaaatcaaatagattaataattctttcgacttgctcagtcatagcattagagtttttccagtcacgcataaaacgatgaatttgttcattcggtaatttcaatagcaaaattatcagtgaccacaaactattttccatcgttggactgaattttaactgtgggaaaatagctagttgatctttttttccgccaaaatcaggtacatcttcactcaaatttgtatcaagaaaaacctgaaaagcttgccgagcatgtggtcctaaacctaattttacaaattcttctcgaattcgttcaactgaaatttttttaagtaatttatgattatccttaattgcctgttgagtcttgctttctaacttaaattcaagttgactcataaaacgtacggcccgcatcattcgcaaagcatcctcgtgaaatcttttttctggatcacctacagcacgaatgacatggtttttgagatcatctagtccgttaaataagtcaacaatttgccctcgtgtatccattgccagagcgttaatcgtaaagtctctacgctttaaatcttcatctaagttttgaacaaatgttacatgatctggacgacgaaaatcttgataacccgattctgttctaaaagtggtaatctcataactttcaccaccataaaggacagtcaccgttccatgtttaattcctgtatcaattgacttatcaaataactcttttacctcttctggataagcactagtagtaatgtctacatcatgaacatgacgatgtaacaaaacatcgcggacagaaccacccacaaagtacgcttcaaagcctgcattttctaatatctgtaacacgggcattgccttggtaaaaatttctggtaaattatctatctttatcatattaaaatctcaattcttattgtctttattattacttttgctatacactttgttaaaattgaggaaagacataaaggaggtaatcattatgcgtaagattgacaaaagtatcttaattgatatcctcatgatcgcgctaggctgtgctatttacgctttaagtctagacatgatttctgtccccaataaactagccgacggcggactaagtggtatttcacttcttctgcggcatttttggggcatcaacatgggactatcgacccttgtattgaatattccactaattttgttaggctatcgctttatgggcaaacgtcttttagcctatacaatctggggaacgctcagtctttcctttttcttatggttttggcattcagtacctattataaaacaattagatttagaacacgacctcttcctttcagcaatttctgctgggttattgtctggaatcggattagggttagtatttagatataatggtacttccggtggaactgatattattgcccgaatctgtcagataaaatttggtatttcgtctggcaaaatgcttttagcttgtgatgcaatagtactcttcgcatccctatcttgcctagacatcaagcatatgctatacacattattagcttcttttgtcttatcccgagtaatggataccgttcagcaaggtgcatacacagcccgtggtttattaattatctctgacaaatatgaacaaattggcaagatgattgatttaaaactaaatcgtggtttcacatatctaaaagctttaggtggctatcaacaaaatgaaaaacgtgtaatttatgttgtagtcgcaccgcgggaaattccatcaatcaaagctttaatcaagcaagaagatccacatgcttttgtttcaataattgagataaatgaggcaatgggagaaggatttacttataaaaaaccacatcgctttttcatccacaagtaaaaagctataccatgatgcatttcatgatatagcttttcttttactaataattaataattacagtcaatacgttattagctttaacgtattcgttttctccaatttgaatgaatggccgttcatcaatttctttatggccaagatttttaactttagagccttgtttaacaaacttacctggaattggctgaccatttttatcataaacatatgatggatgcttaatgcggttaattgtctcggctgtgtccttaatgtatggtaaaaatgccccttccttaacgaatttattcttaccaatcttcacaaaattattgccattaattgatttaatgcctaggatcttgtaaacacggcccttttttaaatgtccaactttttctcctttacggttaaaaatcgttgcttttctagtcaagtttaactttttaccctgacgaattggattagttgtagctgcgttaactgtctgagcagtcatcgcacctaaacttaaggaggctaagactactcctgccatatacataatttttttgttcatcatgatctcatcccctaatcattacttaatcttcttacctatattttaacaaaaaatgcagaggttatacacttttctctatttttatttatgggatggataacacttattctttgcaatctttcatggcaagaactaatcttagcttgtaagcgtttgtcaatatcaagcaatcaagaggatgaaaacaatgccaaaaaacagttactcccaagaagctttcgttcatgtctatttacttcttgggaattaatggggtaattgggtccggtgcctttttaatacctcaaacaatctataaagatatgaacttgatgagtgttttcataacaatttgtgctgctcttacagtaagtatggttactctttgttatgctgacttgtcaagtcgttttactggatcaggcgcagcttggctttattcatatcacgcctttgggcgatttactggctacgaacttggaatatatacttggtttttaggatgctgtacatatgcggcagaaatagtagctttgttaactattttaaagactttgtcccctgtttttagtaatcacgctgttcactacgggatagctattggaataattgtgctaattgtgctgtttacgattattaacttatttggtcggacaattgtaaaattagtcgataacttatcctctgctgccaaaatgattactattctgatttttatcatcattggtgccttttttattcataaaatgaactttacacctgtgattcctaaagcagcaaccctaggtgttggtccttacttcaaacattttggtgctgcatttagtgtagtattttacatgtttactggattctcctttattccgattgccccaaaacagatgaataatccagagaaaaatattcccaaagtattgatctcagtgatgatcactgtgactattttatatgcattaatgatgttagtagctatcgggattttaggatccaagatggttaattacagtacgcctattgctgtagcctttcaaaaggccgttggtgattggggctacgttctagtgattgcagggatgctgattagtgttatcggcgttgcttttgcaggatctttcaatactccatcgttgattgcttctcttgactccatcgttgattgcttctcttgctaatgagcacgcaatgttacctaaatggattggaaaaaagaacaagcatgatgctgcttgggtagctattttactcagtgcaatcatcactatgattttaatcacacaatcatacctcttcttggtatcttgcattgtattggcttcatttattcaatatgtaccatctatcttagcagtaatcaaattcaagcatactaatgaatttccaaataacggttttaagctcccattcggctatgttattccagctttggcattaattatttcatgctacatggtaaccaatttcacttggaaaactattttggtcggaatagtcgtaggggtattagccgcagtagcttacttcttcattgaaaaagatgaagaaaagcatcaaaagtatttgtcaaaaatgcgtaataaataattttcaagttataaggacgatgactagaaactgtcaaatcttttgtgtaaatagttctttctcgtaaattgattttttaattatttatttaatcaaagtaggattctaaggtgtcctgaacctgaccaaagcctttatgaattcgattgaaataacggtcattgtagctcattgcctgaataccaataaaagcatcaagcgactgttcagttggaaactctgccttaggcttagctttgcgcttgatcacattgttaaatgattcaatcatgttagtcgaataaattgaagctctgatctgcttgggatagttataaaagaccagcagatctggttctatgtctttcaagcttctgataacatggctgtaaaccttgccccatttggtatagaagtcatgcaggacagctgtggcttcttctttgtttgtctgttgatgcacctgtttgaattcgttcatgatcttttcacgatcgtcgacgcgtactttagcgcagatattgcgcatgacatgaaccaaacagcgttgaaaatgagctttaggataagtcctggccaaggctgttttcatgccaacaacaccatcagaaagaaaaagctcaacttgctttaagcctcgggatttcatgttttgaagcatatctgtccagacttcaatgttctcgctaggtgcaatgcagtagtcaatgacctccttgtgcccattaggcttgatgccaatggcaatatagactgcttcacgctcaaatgtttctcggcgcaaaggaaggtatgtcgcatccaaatagacgcagaaaaacttgtcgcttagcttgcgtttgtggtaagcctcaacctttggaatcatctgcttggaaatatttgatacctgagctggactgtaatggctgccatacatcttttcaattagatcggctatttccctggtggtcacgcccttggagtaaagcttgataatcatgctttccaagatatccgagtgctgcttgtagccaggcagcgtgtgctgatgaaattgaccgttgcgatcccgaggcacttgcacttcaattgggccaaattgcgtatcaactttgcggaaataagcaccatttctagagttgccagtattccagccatttctggcatagggatcatagcccagaaaggcagtcaattcagcttctaacaagttattaacagcctgttgtagctctttgcgcaataaatcatttattttgtctggattgaatagagcttgagcaaaatctttggtaaaatcattcatgaaggagttcttctttctgtatgtgtttttttgttcaaaccaatcatacgagaaaggaactcctttttctaatgtttaaagaaataaatttaaggaatcattcatccttacacaaactattttacagtctcgatgactatccaatatcgcccttattttttgatcaattaagactttttagtctgcttttaaatctatttttcaacttatacattatgaaagcccatctcctcttaataatatttagtgctaaactgttagatagattagtattagaaaagagcaacaacaaatgagtaatcagaaagctaaaataaataataccgaaattaaaactagagtatctcacttcagaccaagccagtaaaaaaattcaagttaacataaaaggaaaaccatatgtctgaagagataattaacacagtcacaacaaaaaatgattttaagagtgcattaagaaatgcgggtattaaagatgatgataccgtattagttcatactgcactaagtaaattctattacgttcctaatggtccagaaaccattgtcgaagccttaaaagaagctgtgcctaatggaacaataatgatgccctcacaagtttctacgaattgtgatccagccacttgggaatatccaccagtacaaaaatctttgattcaagtagttaaggatgctatgccaccttataatcctacaacatcaatgacagaaggcttaggggttacgccagagtatttcagaactttgccagatgttgttcgaagtacccatccttacttgccaattgctatttggggcaaaaacaaagtaaagattgcacagaatcaacctttaaatattccttatggaattgacagtcctttagattatttgtaccagaataatggcaaaactatctttttaggcactgattatgaaacgtgtacagttttgcactatgcagaatccacaattggtagaaaaaccgaaacatgttctgctgcaactagtctggatgaaagcggcaaaactatttggactgaatatcaaaatattgatatggattcatatgatgactttaatgaattagggacagagtttgaagcaaagcatccctctgctatcaaaaaggttaagttaaacaatggtgtcatcaaagcaataaatgtaaaaccgctaattgattttgctagaaaatggtttataaaaaaagacaataatcattcaatttaataataaaaggaagaagtcactttcaacttcttcctttttctttatttaatctttgttaaaacctttgcacctatatttaaacctacactatgcgatttaccgccccaatcacgttcatcataattatccatatcagctaaagtatctgcagtgaaaagaaattgtgcaaaatcaatctttctaaactgagcacatgctgctaaagctgcacattccatttctacagttgacgcgcctaactgacgaaattgtgccacttttttaggcgtttctctaaagaaaccatctgttgtccaagtcgttatctcgtcatattctatatttagctcaactaaaatcttttctacttccttcaaaaatatagaatctagttccacaagttgtccaggattcatatagtgaaaagatgtcccttcatctcgaattgcacgtgttggaagtagcatcgcattttcaggtaaatctactaaggcacctgctgttccaatggttaacaccttttctactccataagcaattagccattcaagcaactgtacagctgccggtgctcccaagggcgcttgacacaaagtgaaaaattcgttattaatttgaacttcataaattttaggattaaaagaacatgactcaaattcacctaaagtacggtgaaaatggtgatctaaaaatgcattaatttctttttccggcacgaatgcgtaaagcaatcttggatgaaaatgaaatggttcttgatcgtgatttggttcaagaaccgcatgaggatgtttgtcaaagtctaaaatgaatggttgtttgttcatattttacactccatttttagttgaaatattatcataaactcgctaatacctgagatccaatattcaagctaacgctatatgaatcatggccccagttacgtttatcatagttatccatatcagctaaactatcggcagtaaacaaaatttgtgcaaaacttatatttctaaattctgcacaagcagctaaagctgagcactccatttctacagtttttgcacctagttttttagcttgcaaaacttgattaggtgtttctctaaaaaatccatctgttgtccaagttgttccctcttcatattggaaacctaaattttttatttcattctcaactcttcttacaaaatttttatctaatgcaataatcttacttggttctttgtagtaaaaagatgtcccctctccgcgaatcgcttcttgagggacaaacatcgtgttttcaggtagattatccaaagctcctgcgtttccaacagataaaacttgtttaactccataattgatcaaccagtctaaaaactttgttgaagctggtgctcccactggagcttgacataacgtaattagttgattattgacttccacttcatatattttaggtctaaacgaaacagttttaaatttgcccagagtcttatgagagtgtttatctaaaaacgagttaatttcatcatctgggacaaatgcaaaaagcaatttttcatgaaacttatactctaaattttcgactccaggttctattacagcttttttacttaaatcaatatctaaaacaaatgatccttcattcatatacgcgtggtgctagttaaatcgttctagacaataagccaaattataagctaaaattgcaatttccaaccggctttgaaagcctatcagactacgtgctcgattgttctcggcattgtaataggtcagaagcgaaaagtcgctttcaattgttctgcgaatagccatcaattgatgatcattgtgctttttagctcctgtcatatttttacgatatggtgtccaaagttcgtaacccatttgttttagctgttgatgcagttctttgcctaaatagccttcgtcgccaagaagatagtaattagatggatgggtattttctatcagttcaactgtctccctggcatcatgaactgatgcctttgttacgacataatcaagaatgtaaccgtcatcgctaacaatggcatgaactttgaaaccatagaagtaaattttcttggtggccttataaccaatgttggcataaccgcgaaaaattttagcacgatagtttcgaattggttggcaaacaggtaccggaaagctgtcaatgatcaagaactgtccattcaggtcaacctttttattcatttcttgccgtatctgataaatcaattgcaatagctgacgtgaacgccgattaaaacgtgagtgtgataaacaattgaaacattcacagaatcttctttgtgattcaattcctgtcttagcttgccagataagtaaagccaaaatcagactgtccgtagttttaatttgatcaatatttcgccgatgagtaaactcagccggtgcatacaaacgataccagtgccgacaaattatcactaaatctttaaaactaacttgtaaatggtggctaaaacgcttaagcttaaggcagttcaatcagatcagactcttttctattattactatttacaagtcgagtctaacaagattggacttttttattaactaaaacgatttaactagcaccacgcgtattcatatatattctcccttaatcaataaatggatagtcttcattaaagtaatgatcaataaaaatttgatgttgcttgttaaaaatcttggataatttatctttagaaaaatacttcagatcaagagtttcagagctaatctcttttgacattttttctactaattcaacagttactgcctgtgccacatcttgattaggataatgctggataaaattagttgaaacgcctaatagtgacttagttcttacttttaagccagtttcttctaaaaattctcgaacgcatgcttttggagctgattctccaaattctaaagcaccaccaggtaagccccatgcattaaaatctgatcttttttgaagtaagatttcattcttgctattagccaaaattccaccagcaaaatttagaataattggttcatgaccaactttttggcgtaaggtcttaatatagtttttaaccatcgctagtcctctacttgaatatcattcatcacaatttcaacttcatcgtctaaattaatctgactagtaaaagcatactcgggaataaaaccaagataatctttttcattccaccatgagcgcattgtttcttcaccaaaagaatgttcatgacgagttttatggcgtttcattgtttcttcaaacggaatatcaaaataataggcataaatttgatcaccaaaaagctgctgagattttttgaataaatcagcataccatttcgcattcaagataccttctaaaatagtgtaagaacagtgatgataaccatactcaagcaagttttctaataatggcaaagcaaatgtcttttctccgtctttaacattcagcatttctcttctaactgtatcttgtggaatcaatagtgtattgtgtggcaatcgacgatggatttctttagacagtgtagttttgccactgccagagtttcctcgaattataattaattttgatgtcatcatagaaatcttcactttcttaaaattaattcactgcatctctaattgttgcaaacttatcaaatgtataatctattataatctataccatgaattttaacaataggcagcattttccctttttgtcccatcaataatcctgcagaagcggctagcatgtcacagatagtttcaacattagttttatcttgatactgactttttcttaaaccagaaacaccatacaatccaattgctacttgagttgcaccttttttatcaattcttccatcactatcggtaattatgatagctactctgacttttaattgatcaaaaatatcatcactaattctcttagcaatttcatcacaatttttaggtaaaactattgcagtaccagcatcaattttatctacacctgcactagttaaaaacaaaccattcggcaaccacccaccaataaagttcttagatatctttagtttcttaccactcttatcttcggtttgatcaattataatctgaattagtcttggagcttttctaggtatttgctgatgcaaacgtaaggctaattgacttggattaatagaatttaagtgaacaaacagaccttcagatttagaaatcaatttagaagcaatacataaaacatcattatcgcgtatattaaatccttcatttttgattgtcctaattatttctgcacttaagttgcactttctctctattttcggaaaattatgcagcgcttcaattgtaatcatgactataacctcaaatcagatgttaatttgcccaaaacagtaatttcgtttctatcgcaatacttcaatgtttttatgatcggttaccatgatttatctggtatctttctcctttattaatggtattgttagcaaaacaacaccaaaatacactgcggatacaaaaaaacattacttttaagtctccaaatactttcataatactattgcttataaataatgaaatactaaccaagatctctgcaataaatgaaacagttgaaagcatagtcgacttattgctttctccataaatggcttcattactagtagctgaaatttgtcccgacatcattcccatcaatagttcaattaatagaaaaaggcaaagcagtaaatatttattttttagagtaccacttaatataaatgctccaatcatacttccagtattcaacaaagtaatcccttttgaattaaaggaagtagaaattttactaaataaaatcgaacctagaattaatgcacacataaataatgtataaactagtgaaagattaaagcctaatttttcaacataaataatcgaccagtagataaggataaactgcgttccacaatcataacccacattcagcaacaacaaaatccagaaatttctttttctaaaaaagccaacaatatttttaatattatatttatctttctttttactagaagccctattatctgaaaagataagaaacttgtcataagccaaataaaggctggatataacacaagtccaagcattgcgaaccatattagtgcagtatctttaattccaaatagccaagtcccaatatttccaccgattaatgtggttaaattcaaaataattatttgcatccccattagtttgctactaggggcaattttattttgttcctgtaagtcagttacataggcaagtaaagtacctgaattaagagctaagccaataccatataaaagctctgccgctgaaaagaaaaagaagtttctaaatagaattagaatgaaaaaactcgtggcaataactaaagatgataaagctaaaactttcaatcttccaattctatcagctaaatatcctgctggaagaagaccaaatacaataccgatattttgaaaagattttattgaaccaatatttgcatccgggattccatttttagcataaaataatgaaaaaattcctgacattgatgatcggaaaagtgtaaaaactgctgtaaaaactaaaaataaaattgcaattttaaaacttacactttttagcctcatgatcatcaactcctattattttttaagatactgtaaaatagtttgtgtaaggatgaatgattccttaaatttatttctttaaacattagaaaaaggagttcctttctcgtatgattggtttgaacaaaaaaacacatacagaaagaagaactccttcatgaatgattttaccaaagattttgctcaagctctattcaatccagacaaaataaatgatttattgcgcaaagagctacaacaggctgttaataaattgctagaagctgaattgactgcctttctgggctatgatccctatgccagaaatggctggaatactggcaactctagaaatggtgcttatttccgcaaagttgatacgcaatttggcccaattgaagtgcaagtgcctcgggatcgcaacggtcagtttcatcagcacacgctgcctggctacaagcagcactcggatatcttggaaagcatgattatcaagctttactccaagggcgtgaccaccagggaaatagccgatctaattgaaaagatgtatggcagccattacagtccagctcaggtatcaaatatttccaagcagatgattccaaaggttgaggcttaccacaaacgcaagctaagcgacaagtttttctgcgtctatttggatgcgacataccttcctttgcgccgagaaacatttgagcgtgaagcagtctatattgccattggcatcaagcctaatgggcacaaggaggtcattgactactgcattgcacctagcgagaacattgaagtctggacagatatgcttcaaaacatgaaatcccgaggcttaaagcaagttgagctttttctttctgatggtgttgttggcatgaaaacagccttggccaggacttatcctaaagctcattttcaacgctgtttggttcatgtcatgcgcaatatctgcgctaaagtacgcgtcgacgatcgtgaaaagatcatgaacgaattcaaacaggtgcatcaacagacaaacaaagaagaagccacagctgtcctgcatgacttctataccaaatggggcaaggtttacagccatgttatcagaagcttgaaagacatagaaccagatctgctggtcttttataactatcccaagcagatcagagcttcaatttattcgactaacatgattgaatcatttaacaatgtgatcaagcgcaaagctaagcctaaggcagagtttccaactgaacagtcgcttgatgcttttattggtattcaggcaatgagctacaatgaccgttatttcaatcgaattcataaaggctttggtcaggttcaggacaccttagaatcctactttgattaaataaataattaaaaaatcaatttacgagaaagatctatttacacaaaagatttgacagtttcttttttaagatctataacctctttaactatttctgcaatttgttttggatattcaaaatgtatatagtgagattcgcctaatgttataactttagatttaggattatttgaagtgtattctgaccgcttatattcattttcacgatacttttctgtaataacaatacttggtgttttatcacttatcctggtagtatttttccaaaacgaatcattttcgtaggctgcttgtgcgtttaaattatccttttcatcaaatttcttcgcattttgctctgtagttgtccaaaactttttattttcttctggagtaaaaatttctctaagatcagcttcaattttttcttgaagttttgccatgtttttatttttctcaatataagctggttcctttggaggatttaacatgatttctctagtagttggctcaattcctacaaaagccttcaaattattgattttatctttcatttgcatagcatacacaccgccaatgctatgagccaaaattataactttttttgcattaaaatcgttaataattttagctaatttagtagcttcgtctgatactgtatagtcctttaaagacttgccactaaagccactattcaaataatctgatgcaaaatagccatacttattgggcaaagcttcaattacttttgaaaaagattgtgctgtatcaaaactaccaaagccattcaaaaaaacaactaatggatctccctttcgataggcaaaattaatcttgcctaattcagtttcaatatcgcttctttgcataaatttctccctttattaaaactttgaagtcgttatattttaattatttcttagcacaaataccttatgcccattttcatcatcttttaaatacacgaatcagcttctagcaatttattaacagcctgttgtagctctttgcgcaataaatcatttattttgtctggattgaatagagcttgagcaaaatctttggtaaaatcattcatgaaggagttcttctttctgtatgtgtttttttgttcaaaccaatcatacgagaaaggaactcctttttctaatgtttaaagaaataaatttaaggaatcattcatccttacacaaactattttacagtctcgcctgcggcatcatatcttgaatctgcttcttggcccgctttaatatttttcccggccatttttaccaaattgcccacctgcatatggctaatattaaagccagacaggcaattgactgctagagcagtattgcgataagtggcaacgctgcttacttctaagatgtttttgactgctaaaatactgtagcgcttgtatttgtcaaagcccattaattcatccaagggataccttgcttgtttgcctgggcagacatatcttcttctgacatacctaacttcgccaaaagccatattgattgagcgctcattcttcttatcaatctgatagccctgtgctttaaccttggtaatcatttcatcatcaactttagctaaagccaaggccatgatttccttaatcaggtttaagaagaaacagattatttttctttcacgcttaatataattatcttcagactttataatatttgcgatttcagttacaattgaattcataaaagaccagcttctaatgtgttttttgttcttaacatcagactactggtctttttgtttgagctcaagtccaaattcaaaggacttgggcttttttaattatttattcaacttaccgtaaaaaattatacacttagtgacgaaatttttgctattcaaagtgctcaaaaagagacgcgtaatcgttatctaaaaaaacaaaaagctatgttggcagaacatgatcttttacccgaaaaaaagcgcaaaccacgtgcccgcatgttatcagagctgaatttaaacaacgatgatgctattttaacttttgccaataaagttaaggttttcaccagtggacccgagttgtttgaccaaataattgctgatcttaagcaagctaaaacatcgattagtttagagttctacactttttataatgataatctaggaaagcgtgtcttacgggccttagaagaggcttctgctaaaggagtaaaagtcagagttatttatgatgtctctggctcacgtggtactaaacctgctttttttaatcatttaagagagcttggtggcgaagcacagcctttcatttctacttctaaaaagcattggtttactacaccacgactaaattatcatttacaccgcaaattaatcgtaatcgaccatcatattggctatattggtggctttaacatcggtgatcagtacgttaatcaatctaaaaaatttggtcattggcgcgatacacatttacgtgttgtgggtcaatcacctatcctaatggagacacgctttgccatggattggaatacttctatcagacgaactgcattacctaaatttgatctaagcgaattacatgcttttactgtcgaacgtaaagatcttgacaacgatgataacgtagcaatgcaaatcgtttcttcaggtcccgataaccaacattatggcattcgccgaggatatgagggcatcattgctggggctaaaaactatatctatattcaaacaccctatttaattcctgaagaatccattttagaagcattaattattgctgctaatagcggtgttgatgtacgcatcatgatcccttgcatgccagatcatccctttgtttaccgagctaccgaatattatgcaaaatatttagttgctcatggcgttaaaatttacaaatataatgatggcttcatccatgccaaaacaatggtttctggctccaatatctcatctgttggttcagccaatcaagacttcagaagttataccttaaacttcgaggttaacgcttttaattacaatattcaattaactcaagaacttaaacaaatttttgaaaaggacctagctagttgcagtcttctaactaatgaatactttaatcagcaatctaaatggcttaagtttaaacaatacttttcacgtctgttggcacctattttttagaaataataaaaccacgaagcaaaaacttcgtggtatttttttacagattattataaagatcctgcatttcatcatcttctggagctaacttaagatatctttctagcagttgttttgttatttcatcattattttgtacattgaaaaagattatcatttggcgcaaaaagtctggattatccttgaaatccggataagctagtaaaaattcgctctgtgctttctgaatatcatccaaatcctcatatgataatgccatattccaatgtgcctgtggctccacgctttcctcatctaagttactaaataaggcaatattctccttagcctggtgttcatgaacatataggttagatagctgcatacgtaaatcactattgtctggcgctacttttaaccccttttcaagtaagtcacgagctgtatccaattcattcaaattagctgctgcacgtgctcccattgaataaagtgtttcatccagttcattgtacgctaatcctgcttgagcagtcctcaatacttgttcattgtcatgctgatgatcataagcttgtgctaataatggatacgcatttacatagtcaggactttgctcaatcacttcatctaagaacttaattgcctgcttatcatcacctacagataagagaactaatcctgcttcatacttagaatcaatatctaaaatactatttgcatgttcacgaataactttggcagcttcttcataattacctaatttggcaaaagtcgcaaataatctttggtacagatttacttcactaaaagtactttgacgtttgattaaatcttgatataactcaagtgcttgttcataattaccacttaaatattcaatctctgctaaaccaaatttaatagcatcttcttctggagctaattgtagtgctcgtattaatttgtccttagctgtttctattaagccgttagtttggtaataatcagcttgtactaatagactatccaaataagctgaagagctctcagggacattatataaaagcgacagaccatcgtcatcatcgccatcatttaacataatctctgccaagtaaactttaaataaatcttctttaggaaatttagctattaaagctcgatatatttcttttgctaaatctgtaaaacctaagccagttaggttttctgctaaagatgacaagacctcgggagcatcattatctaaagcttcttttaaaaggtgtttgttttgtgaaaaatcatgattttgaattgcatctagtaattgttcagaataactcataatacctccaatcaagttaccattgtactaaaaaaagacgccggaacaaagtccaacgtcctatcacattagttaagctattacttaacggcatccttaagagctttacctggcttaaatgcaggtacttcactagctgggatttcgatttcatcaccagtttgtgggttacggcccttacgagcagcacggtgacgtacttcaaaagtaccaaaaccgattaattgtaccttttcacccttagcaaggttttcttgaattgaatcaaggatagcatcaacagtatttgcaacttgcttcttagttaacttagtttttgaagcaacttctgaaactaattcagccttatttgccatgaataattcacctcctgaatttgaacctaatgttcaaaaaatttttctttgtttaagctaaacaaggaaaaatgatcacaactaatcatgttccctaaaaacaaaaatatcacaaaaaccttataacaacaaggttttttatgatattttgcttatcttttatttacgtttacgtggtaaaatcttgattggtgtacccgtaaaatcaaagttttgtcgtaattgattaatcaaaaatcgttcatatgagaagtgcatcaattctggatcattcacaaatacaacaaaagtcggtggattcgtacttacttgggtcatgtaataaacacgcaatctcttacccttcaccattggagttggaactaacttacttgcttcaagcaacaaatcatttaagacactagattgaattctttgattttgattatcatagacttctttaaccatattaggaatttgatctaatctttgacctgtcttggcagaaacaaaaagaataggagcatagtccaaatattgaaattcatctctaatttcacgttcaaattctttagcgcttgtactattctttttcggcaaatcccatttgttaacgacaatgatgattccacgacccgcctcgtgagcatatccagccacatgcttgtcttgttctctaatgcctgtacttgcatcgaggacaagtaaaaccacgtctgaacgctcaatagcactcatagcgcgcattacagagtacttttctgtcttctcatacactttgcctcgtcttctgattccggcagtatcaacgaccttaaattttacaccatcatgagtaaacggcgtatcgacagcatcacgagttgttccttcttcattagcaacaattacccgatcttcaccaagtaatttgttaacaattgaagacttacctacatttggtcgaccaatcacgctaaaagaaataacatcatcagcttcagtatctttatcgtcaggaaaatcattaacaatctgatcaagcaaatcaccaataccagtaccatgactacttgaaacaggaatcggatcccccaatcctaaactatagaaatcataaatatcgcttcgctgttcaggattatcagctttatttacagctaaaataactggctttttagtacggtaaagaagatgagctattctttcgtctaaatctgtcacgtgatttaccacattggttaacatcacgataacatctgcttcttcaattgcaatttctgcctgagctctgatttcttcctcgatcttgccaccttcccaggtaataccaccagtatcgatcaaatcaaacttatgccccatccattcggcttgagcataattacgatctcgggtaacaccgggtttgtcctcaacaatagctaaacgttgattaattattctattgaaaagtgttgatttaccaacattgggttgaccaacaattgcaacaactggtaaaaccatttctcgccctcctttactaatctaaacataaataaaaaagccgactcaagtcggcttttttataaaatgactacttacggtcctttaattggtcaccaatgatgtcacctaatgcaaagccgttgtcgttatcactcatgtacttcttgtttactgaattttcgttacgtgaacgacgtggacgagaattatgattttctgaagaagcatttgagtcagcagccttgattgaaagtgagattcttctatcacttgggtcaatgttcaaaaccttaaccttaacactttgaccaacctttaaaacatcgcttggcttgtcaacatgcttgtttgagatttctgaaacgtgtaccaaaccttgaataccatcagcaacttcaacgaaagcaccaaagttagttaatgactttacttcaccttcaaaaatatcgccttcgtttaagtcagctgtagcttgttcaaatggagaaggttcagtttgcttaatagacagggaaatacgatgtctgtcattgtcgataccaatgaccttaaccttaacatcttgaccaacctttaaaacatcgcttggcttatcaacgtgcttgtaagaaatttctgaaatatgaactaaaccgtcaacaccaccaacatcgatgaatgcaccgaagttagtcaaacgtgaaaccttaccttcaacaacgtcaccaacaactaattgtgatgcaaccttgtcaaatgcttcttcacgttcttcttcaactaaatccttgtgtgaaaggattaagcggttcttgttaggatcaatttcggtaatcttaagtttcatagtcttaccaatgtaaggcttaagatctgaaacgtaacggtttgaaattaatgaagctggtaagaaaccacgtgtaccaacatcaacaattaaaccaccacgaactgatgaagttacagtaccttcgacagcatttccgtcttcgaagtctttttgtaacttgtcgtaggcttctctttcctttaagcgggtaactgagaagaagaattcaccattttccttgtcgccaccggctcttcttaatactaaggccttaaacttgtcaccaggcttaactaaatcacgtaagtctgcgttacggtctgaagtgtattcacgacgagtaatgacaccttcaacaccagcgttttcaacaccaacatcgatttggccgtcttcaatgtctaatacttcgacatcgacaatatctccgacctcaactccttgcatttgctttaatgcgtctaaaaattgattactgttttctgacatatgtacctcccaatatcatgtcccattttataggaaaccgagatatttttctactattttgtgctattttttctaatttttttgttttttttcgatttgagctaaaattgcctctacaacttcgtcaatcgacatgtttgtggtgtcaatttcaattgcatcatctgccttttttagcggtgaaattttgcggtgagaatctttataatctcttgctgcaatatctttttcaatttcatcaactgtttgatcagatttaataccacgctctttaaaatctaataaacgacgttcagcacgtgatcttgctgaagcaactaaaaagatcttaacttcagagttaggtaaaacagtcgtaccaatatcgcgaccatccataatgacatttgtcttgcctgccatttcacgttgcagacttaccattttttctcgtactttcggcaaagcggatacttccgaaacattagctgaaatttcaggcgttctaatttctttagaaacgtcctttccagctacatatactttttgctcaccattttcagatttcaattcaattccatcttcatcaatggcattcaagatacccgcttcatcaccataatctaagttatgattacgagcaatcactgtacatgcacgatacattgcccctgtgtctatatagacaaaggataatttacttgcaatgattttagcaactgtacttttacctgctgatgcaggaccatctactgctacttgcattctaataaaaaagagatcttatcatcgaccccttttatcctttctgaaagattatttcaacttaagtgtctgacctgcttcaatatttgaagagtctttaagattatttaatctggctaattcatcaacagtcaagccattcttttctgcaatttcatttaaagtatctccactttggactaaataagtcttaggagtagcagaactactagatgagcttgaactagccttttcagactttttcttgctacaagaagatgatgaggttttcttagtcttaacagacttggatgatttagaagaaaccttcttaactgtttgaacttcttcagctttttctgaatggcttgaagccaaacgatgaacaactgggataagtgcaattaaaataaccgctaaaattataataactgctatccaacgtgctgatccactaggctgactatcttgtgagcttcgcttttcagtaggtcgttcatagtgctgatatggcccggttgactttttatccatcaaaaattcctccattcacttaacggattaattttagcatattttaggatgctttgaatatgaaaaatcccatcaacttaaaaaattgatgggatgataacttaattcaaattaaatctcttacgaacgaatggcttaattgttttcaaggtagcttcaaacaataagtaaacagccacagcgttaattaatccttttaacaagttaaagggcatgataatactaaaaatgtaggttgacattgatggtaaatgcaataactgacccaagtaaactttctcagtaaagcttaacaaggcactatagctattaatagcaggcaagtttggtaccgctgttactgcgtaaataggagtcaaaacgaaggcattagccaatgacatcactgctgccattgcgataatcccaattaccaaaccacaaattggtttaactctgcccatcattgtcttgcggttatccgcactcacatttttacttaataaataaaatggaactgcaaatgacattgaagctaagaatgctgctagatttccaacaaggcttggtaatgcaaaaccactaaaaattaaactaagtaacattcgaattaaagcaataataactcccggtacaatgccaaaaataaacattccaattgtaataatgacatctgaaaaatcaaactttaagaaggcaactccaggcatgattggaaattcaaatttcataactacaaaagcaatacagccaattaaagcatatgcaatcacattagttaaactactattcttggatttagcttgatccataacttactttcctttcccaaatagagtagagggagttttataactcgcccctctcattgcaccggacgtacggttccgtatccggcgctacgtttgtgattatttacgagataaataatattctagcggatcgaccaagcctgggcgatccgctttgcttatgcccaatacttttgggctaagcagaaagttaatgacataacccgtacttcttttataccaacctaagcgcgtattagctactttatgaatatcttcatcactaaaattgcactttagtgccttgttaatccgcattaagttaatgtatattcgttttggtagtttccattgtttaatgattaccacccgtactttatgacgcagccattgactgaacttaattagaaaatatttcatgtcgccaactctaaagtaattgacccagcctctaactacttgatttatcttagtaaagactagtgatagaggctgagcagctgcttttctgcgacagagaagttctctcatcttgtcataaagcttgattttgcggtcatctcctggctttgcttgccagtattcgccacttttccagaaggtaaagccaagaaagttgctcttggttggtcgtacaactttggttttggttgcgttgacctttaggaatagctttctttctagccatgatgaaattgaattcatcacacgtttggctgatttaccgcttttgacaaagatattgcagtcatcggcatagcggacaaagcgcaggcctctttgttccaattctttatccattttatctaaatagatattggatagaattggtgaaagagggccgccttgtggtacacctagtttattaggcttaacccaaccatcttccattactccagctttaagaaaggctcgaattaaatggagggtggttttgtcatttacttgctctctaattattgaaattaatttatcatgatttaccgtgtcaaagtatttttcaatatccaggtcaacaacccattgatagccttcgtttaaatattccaagacttgttcaatagcgtcatgagcactgcgtccaggtctaaagccatagctatgctcactaaaatgaggatcatagatcttcattaatactttggcaatagcctgctggattactcggtcaacaaccgtgggtattcctaaaggacgtttcttaccattagctttaggaatgtagactctgcgaacagcttgcggacgatacttcatcttcatgatggcgtcctttatttctacttgatgctttttaaaatagctatcaagctcatcaactgttctcctgtctacaccaggcgctcccttattgattttgactctcctgattgcttccttgagattattttgacttaaaatctgttcaattagttccatctcgtgatatctccatttctacttgtaaatttattcagaattgtcccaattgctttcaccatcaaagagttacgttctctttgtgctaggctatcctcttatccggactgtctgaacattgcttatagcgagatatgctcttacaaacattaggcccttcgctccagtttcattacaaaaccttcagcactactacgacctcagctgacttctcgcgattaacctttttcgaccaggcttacgatcgctgatattaaagcttactcggtttcacctgtccacgagatctctcggggtaagacattcatctttaattttccactgccccctggtttaccgtcttggttttacggttgtcctttggactttaacttgtgctgcagtctcatccaccatttggcctgaccaggtttctgtacgtaggctcggaaaactcgctagccacttccttcacccatagcgtcaccgctaacggcttgtggttcgctacacttggcgacaactacccgtgatctagactttcactagactagacaaatgccatgcccgacacacaacaaaaggtctattgcttcagcaacagaccttaaaaagtgtagtaagtttttttagcctgtcttcttccatctagactttaactatcggtatctaacgattcaaccactgacgtgggtcgcggactttcaccgccggtcgggactttcaccctgccctgaagacaataaccttgaatatttaattacagttataatttagttcaattgcattaatttgtcaacttcatgcttcgataattcccgatattgccctgatgtaagcgaatccagagttaaaaaggcatatttttcacgagcaagcttatcaactaagtgacctactgctttaaacattcgcttaacttgatgataatgtccctcatgaattgtaatttggacaatttgtgtgtctttcttatgatcagttttcaatactttgaccttggcaggcgcagccttaaaatgatccaactttactccttgagtcaaggttttaatttcatcaggagttaaaatccctttaatcttggctacatagaccttagccacttcatttttagggtgcatcaataaatttgctaatttgccatcgttagtcattagcaataaacctgacgtatcataatctaatcttcctactggatacaaacgatatggtaaatcttcgaaataatcaactacagtttttctaccacgatcgtcttctgcagtcgaaacaacgccacgaggcttataaaacaaatacgtgtgtaggctttcccgctcaattggctcatcatcgactgtaatattactaaaagtatcgactttagtacctagcttagtaacaacatgcccatctactttaactcgaccggctacaatcattttttcagcttttcttcttgaagcgattcctgcttccgcaattactttttgtaatcgttctgccattttctatccctctttttctaaatgtttgtctgcgctaccttttgaatcgaataagtcaatctcctcaccatcagttgtatcctcaaagtcttcgattaacggtaaatcagccaaactttgataattaaaatattgtaaaaaataatcagttgtaacatacaacttaggatgacctggagcatcttttttgccgtcttgtttaattaatcctcgccaaatcaatgtctgtaaagctcctgatgaatttactccacgaatatcatcaatttctattctagtaattggttgtcgataagcaataattgagagaatttcaagtgctgattgactcaaattcttagttaaatctttttgaaaatacttttcaattatcttagctgtctgctgactagttgtcatcttataagtatttgcaatatgaattatttgcattcccgagtctggatcagccttcattttttgctgcaaacgagtgactaactgacctagctcttcaccatcaacttcaagtagttcaattagattttgctcctcaagcccattgtcacctgcgacatacaaaagagcttctaaatttgctagtttacttgccattcgtatcaattctttctaaatttaaatcaccgaattcacgtgcttgtgtaatctgaattaattgttttttacacaattctagtgtcgctaaaaataagccaataacatctgagatattctgcattttgtccgcgcaagcaaagaaactaacttgcctttttcgtttaaattgtccatgcaaaaaatccatcatctcattgatcggcgtttctgctactctaattgaagcggtatctggttgctgcaacttcaaacgatgtaagaccatcgtaaaagtcgtcgctaattcttgtgcagttatctgacccttaggcagcggttgaactttagcagtggttgatacactagcttctttagcaactgtaatcggtacttcttcattacgttctttaaaataagcagatattttcttaaacacagaatattgtaccaattgttgcactaattcgtctcttggatcttcatcaggttgaatatcatctacaaaatcgttttgaggcaacaaatactgtgatttaattcgcaataaagttgatgacatgacaaaatactcgcctgcaatttgtaaatttaagctttgcatttggcgcaagtattctaaatattgactagttatttgggcaattgggatatcataaatatcaattttttgcgattggatcaaatgcagtaataaatcaagtggtccttcaaaattcggtaattctaaagttaagttacttttgtccattatcttcttctaccgtttttaataaatttgtatattctggtacagcagttattcgtttatctggatattcgtgctttagttcatcaacaattttccgttcataactaatctcacgaaaaccaggagctaaagacaaatatctaataattacaaactgattagatacttgggttcctattacgcccaccatattattttgactattacgataaagatacaaaataaagtcattttcatcctgattaagcgtgatttcttcttttaagttttcgatatttttaaaatcaggtaaataggatagtaatcccattgctatcttctcataatcttttttatattgtattagcatttaatcacctaaagacgaggatgtgtcttctgataaacatttaaaatttgcttttgtgataaattggtatagatctgtgtcgtgctaatatcagaatgtcctaatatttcttgcactactcgcaaatctgcgccgttttctagcaaatgtgttgcaaacgtatgacgtaaagtgtgtggcgtgacatctttagtaattgccgccatttgacaatactttttgatcatctgccaaatagcctgtcgtgtaatcttttttcctcgattatttaaaaaaatatgttcatcgcttttccctacttgtaaaattagcggatcacgaacttcattttcatatttttttatccaatcaagagcaacaggactaattggaatcaatcgttctttttcgcctttaccaagaacccgaactaagcctaaatcgtcatgtaaatcctgcaactccaaattaattaattcgcttactctcattcccgtggcatataatgtctctaagatagcacgatcacgtatacctaactttcgtttagtatttggctgctcaagtagcctattcatttcagcttgagagagagctgtcggcaaacgacgttcttttttaggcaaatcgatttccaacattggatttaacttttgaatattttgccgagctaaccattgataaaatttacgcatgctagaaataagtcgactaattgagctggttgctttgttcaaatcacgctgccgagctaaaaacgcatccacatcgcttgcttcagttggccatgaagccataccttcattttctacaaaagtttgaaattcttctaaatcttgacgataagcattaattgtattatcacttaatcctcgttcaacttgactatagcgtaaataatcatcaatttgatcttttaaattaatcttctccattatcgttctcttctggatccttaattaaagtaatcgtacctgctgttttatcttcttcaattaatccagccttgagcaaatgaccgaccgcacgtttaaaagctgattttgaaataccaaagtatgatttaatttcttgtgcacttgatttgtcatagaaaggtagagtcttggtttctcttctccgcaaactcatcaaaatcatttgcgcatcatcatcaatttcttcaaaagcacgaggcaaagcactcaaattcaaacgtccatattgactgacaccgactactctacccttgaattgctcacctagtctcataggacgtggcatctgcgattcatgtacaaagccaagataataatcactagttaaaacaaatgctcctatctctcgtgtaacataaaccgttgcaaagacattttcattattcattccacgtggaaagttagcagctaattggtcaaaaatattttcatctgctagcttagcccaaatacgatctttttcgtcagtttctaatcttactaaaagtcgatcatcacgtcgaggccatctttctttttctctaggaagatcatccattgataaaacaacgtctttatcaggtagacctacatcaacaaagacgcctaagcctggacgtacctcggttacttttccccaaccatattgatcgggttgcgcgaatggcaaaaattgtgtcatttctcgatcatgacttttattatcataaataaaaccttcgacttcatctccaattttaggaatatcatcttgcgtaatctcgatcttcttcaattcataagtcagtccatcaatttgaacataataagctttatcgttttcgtcagtaatttttcctttacgaactgttccaagcatttaaaaatctcctactttacatattcttacatataagtataagagatttttatgcaaaataaaatagccagcacttaagctggctattttttgattagctaatctatctaaattatattcttaaaattaaaggtttgagattttgccttggtagatagcaccacgacgagcgtcaacagtaatagttgaaccatcagaaatcttgtcagtagcgtcagtagcaccaacaacaactgggatacctaatgataaaccgataactgcggcatgtgaagttaaacctgaagcttctacaactaagcctgaagctttcttgatagctgggttgtagtctgggtcagtagtcttagcaactaagatgtcgccttccttaaccttgctatttgcttcttcagctgagttagctacaacagccttgccgataactgaaccgttaccaacacctaagccttgaactaacttgttaccgatgatttgtaacttcattaagttagttgtacctgagtcaccaagtggagtacctgcaacgataattacaaggtcgccatcctttacgtaacccttttccttagctaccttagcagccatttcaaacatgtcatcagttgacttaggcttttcagtcaatactggttgtacaccccaaacgatacccaatgagtgttgaaccttttcgtcaaaggtcatagcaataatgtcagcatttggacggtacttagaaatcatacgtgcagtgtaacctgagttagttgcagtaatgatagtcttaacacctaattcttgagcagtacgtacaactgattcaccgatagcttcagttacgtttgaacccttgtaagcttcgaatctttgaagagctaaagtattacgcttaagcatttgcttttcagtacgttcgtcaatttcagccatagccttaacagccttaactgggtaaagaccatttgctgattcacctgaaagcatagttgcgtcagtaccatcaagaacagcgttagcaacgtctgaaacttcggcacgagttggacgtgggttttcttgcattgagtcaagcatttgagtagcagtaataactggcttaccaagtgcgttagccttgcggattaggctcttttgtacaaatggaacttccataaatggaatttcaacacccatgtcaccacgagcaaccattaaaccatctgaaacttgcaaaatttcgtctgcgttgtcgataccttcttgagattcaatctttgggaagatcttaacgtagtctgcacctgcttcttcacaaagcttacggatgtctaagatatcttgagccttacgtgcaaatgaagcagtaatgaagttaataccatagttcaaaccaaacttaatgtcatcagtatccttttcagtaatacctggaaggcgaatttcaacaccaggagcgttaacacccttctttgaaccgattacaccagtgttttgagcttcacaaacaagttctctctttgagtcgtccttttccttgatcaaaaggtcaaccaaaccatcatcgattaatacgtgaccaccaacgtgggtatcatcgtataaaccgtcgtaggtaacgtggatcatgtccttgttacccttcttagtggcatccattgatacacggatcatgtcaccagtattaatagtgaacttgccaccttcttgttcagtggttctgatttcagcacccttagtgtcaaggtcgataccaagaagtaaaccagtatccttttccacttgacgaaccatcttcatacgagcaaggtgttctgggtggtcaccgtgtgagaagttgaaacggaatacgtttgcaccagccttagctaaagcagtaatagtttcaatatcgtttgaagctggccctaaagtactaacaatcttagttttcttcattattaaaaaaatcctctccaaaaatcaactaaattaatatttagtcatttcttcatttacatccaataacgcataatcaccttggtgtttaccgtcaaacaaatcaagaatgtcgtgggtattaagttcaccattctccatgccgacagctaaaccgcccttcccatcgagaagtaacttaacagcataattacccatcttagtagcattaactctatctgtaacagtaggtgagccaccacgttgcatatgcgcaaggacattagcacgagcatcaaagtcaccatatttaaggagttcgtccttaaacttatcagcagccataacgccttctgctaaaacaatgataccatgatctttgccatctgcaaaaccacgagtaagagtttctgcaatttccttaacatcgtatgaacgttcaggaattacaattgcgtctgctccacttgctacaccgacacgcatagcgatatcaccacattcacgacccattacattaacaacgaatacgcggtggtgactgcttgcagtatcacgaattttatcgatagcatccatagcagtacgacaagcagaatcaaagccgatcgtgtagtcagtataaggaatatcattatcgatagttcctggtaaaccaactgagtttacgccgtggcgagtcaaggctaaagcaccatggtatgaaccgtcaccgccaattacgataaccgcatcaataccgtgtttctttaattgctcaacacccttttgttgcacttcttcttgtgcaaattcagggaaacgagcactgtacaagaaagtaccgccttcactaatcttgtggtcaacattttccgtggtaagcggaacaaagtcacctgcaaccaaaccagcgaaaccataacgaattccaaagacttcaagcccatgatggatagcagtcttcgtcacagctctaattgctgcattcataccaggggcgtctccgccactagttaaaataccaatccgtttcatgaattcacctcatcatgattattttgtgtaatttctcacatcacataaatattaacattttttaggcaaaaaagctcacaaaaattgggctaatttatgctttctttccgtatttaagtttgttagcacttacatccatcgtcaaagatagctttgtaatttgaactttattctttaaaattaacttttcgcaaattggttaagaaatactgttttttattttggtcaaatcgatcaccttgaaccttgactcctagtaaataaatatctccttcttttaaaatagagccaaatttttcataagccggtggaaaaataataatttcttgttcgctagatgtatcagcaaaactagcaaaagccattgtttttccatttttggtcctaatttgctttaacttcattaatttacccacgctaataccactatcatttaactgaaattgattcaatggtctagcgttaaatttttgtgcatatttttgtacagctattagaggagtagttgttgtagtaaagcctaaagctttctcttccatttctgctttttgggcagcagtcggtggctcagcaggcttaagtggtgcatcccccagaatctcagataaagacatattttgtcccgttaattgcacattagcaattacatctttgcagttaagcaataactcattgcgattatcttcgattgagtcaaatgctccagccataatcaatgcttcaattgcgtctacttgtaagaacttagcatcgattctacgcaaaaaatcattaaaagacttatacggtttagtattggcagctatttccttagcaaaatcaagacgtaatcctttaattgcttttaaaccaactaaaatcttgccatcttgtaaagtatagtctaattggctgtgattgatatcaggcggcaaaatacgaactccagcttcctgagcttgcatcgaatagctttgcgctttagcagacgttgatgaattgagcatcgctgtgtaaaatgcagcaggataatgaaccttcaaataagctagccaaaaggcaatcttggtatatgccaccgcgtgtgaacggttaaaaccatagttagcaaattgctctatataatgataaactcgctcacctacttctttaggatgaccttttttgaccgtaccagcaataaattttccacgttcttgctcaatgacattctgattctttttagacatcgcacgtcgtaaaatatcggcttcacccaatgaaaatcctgccaggatttgagctgtttgcatgacttgttcctgataaaccaaaattccataagttgattgtaaaatttgctttaaactgggatcaggataatgcacagtagccgtaccattttttcttgcaacaaatgcgtcaatattttgcattggacctggacggtataaagcgttcaccgctactaggtcctcaaaattgtcgggatgcaatttacgcaaaacaccacgaatcccaccagattcaaattggaagactgcatctgttttaccttgttgaaacagttccattgttttgggatcatttaacggaattgtattaggatctagctttacaccttgctgccgcactaaagctaaaatattgcctaaaactgtcaaattgcgcaatcccaaaaagtcgatctttagcaaacctaatgattcaacatattttttggtttgctgagttacaggaatgccgaaaggaccagcctgcaatcccgaaatgccagcaatcgaatcatcactaatcaccaatccagccgcatgaatagaataatgccttggcaatccctcaagtcctaaagcagtcttaaataacaatttattctcaggcgttgcatcaaccaataatcttagttctctagactcttgatatgctttttttaatcccattttatctttagagtacgggattgcgtgagtccacttagtgatttctggtcctgttaagccaaaaacccggccaacgtctcttaatacttgtttagcagccattgtaccaaaagtcaaaatttgagcagcatgatccatgccatacttttgatacatatacttaattactgtattccgttgaatatcaggaatgtccagatcaatatcaggcatctcatgacgagccggatttaaaaaacgctcaaacagtaaattatattggatgggatcaacttcagtgatacgcaaagagtatgaaaccagtgaaccacaagctgaaccacgtcctggaccagtagtaatttttactcggtgacaatagttaattacatcccatacaatcaaaaaataatcatcgaaccccatctgattgatgactcgtaattcataatttaatcttttctgatactcggctggaatacttttttgaccaaagcgcgcttgtaaaccagtttgagccaaataacgcaaatattcttctgaagtcggaaacttatcttgatgatatttaggtaagaccggtttttgaaagatcacttcagcattacatttctgagcaattttccaagtattattaattgcatcatccaagtcatattgatgatagcgttctaaaacattttgtgcagaatctaaataatgcgaaccagcttgcttagctagtggcaatatatcttgcaatttatctcccttagcaatcgcacgcaaagttttttgtaaaaattgctcacgtggccgtaaatattgactatcttccactgcaactaaagataattcaaattgcttagctaatccacggacataatcaatgtaatctatacttgcttttgaagcatatacacccaaataaagatcaaacgttaacttctttagttggcgaacataatcactgcctaatgcctgatttgtatcatgcagcgccattaattcactttttagattagctggtacgataatcaacaaatcatctaaatatttggttaattcattcagcgttaagaccttatcgttttgcccattttccgttaacaaatttaccgcgctagaaagtcgcaataaattatgatagcccttatttgttttggcaaaaactagcaaatcatatttttgggtgctatcaaccaaaccatttaaacgcagttgcatcccaagaagtggtttaattcccgcctttttagccaactcataaaaattgaccaaaccataagtcacgttcacgtcggctaaaccaaccacaggatagcccttctctttagcgtcttttatcaaatcacttaccttggttggactacttaaaagcgtaaaggagcttatgttttgaagtgctgctacttgcataaattaaccacctttcgtcattacaaacattaaattaagtataccaaattgaaccaatcaggtttgaatttgcgcttcatttttgataaaatcttacacgaaagaaggaatcattatgggtcgttatatcatcacaactgtatggagcgtaatctacatgttagttgtaggctttattgctggtcctttaacccgaagtgcttcattcaacggcacagatttaagaaattgtgtaatcgttgggatcatttttggtattcttttctcagcaattattgcgactattactgctcgttcacacaaagataatagtaaatacagtaagttaaaataattattcaatctattcaaaaaagacgtgagatgtttttattctcacgtctttttcgtttggtttagtaaaacttataattcttttttgtatctacttcgactggtccatgagtcaaatattcgctaaacatttgtacatagtccttatccaaagtggtttcaattttgtccatactatattcaggataaaatcccccacccatagcacgatagttgttaactgctaaatgataaatctgatcatctttgattggcttaccgtgcaaagttagtttagtcagccgttcacctactggtctggataaatccgcttcatattcgactggataaaagacgtcaaaatgatacaacattggcttaggcttaatccatcgatcaataaagccaatgtttcctgcttcatctttcttcaaaaagccagcagagtgctcaataatatgacgtaattctttaccagtcagcttcacacgacacaactgattagcatacggataatttaacaaaacatctctcatagtaatggtcttatcaaatcccttagctgtctcactcatcactgcagttgccgaaacatcagctttagtaaaccataattgcatttgctggattaaattaataaatggcgcgccttctattctgcctttcattgcattttcaattcgagcaggtttatctaaatgtgcaattggttgatctagccatttttgtgttcttttatccaagtcagatacaatatcaacaattacaggatcaggatcataatctttagtgtcaatcaacttagtggacattgatttgattttcttagtatcatcatcaatatcaagaaccacttcagctacagcttcaccgcgataacctggttgaacaatagcagtatcgcgtgtaaccaaatttaagcgccgatgctggtgacctgtcaataggacatcaacttctggaattttggttaaaatctgataaccttcattttcaccacgattaggttcagtcgccttaccagtttcaggatcactttcaaagccaccatgatacatcacagctaaaatatcaacctgagggcgtaatattttggcataatgcttaattttttcgtaagcagaggcaaactttaagccttttacattttctttaggttcccaatgtgggatatattgcgttgtaatccccaataaaccaatctttaagccatttctcttgataatagtgtattctctacccaaaaatggaacttctgtttctgcatccagtacattatcattaatgattggtgcctcattgttatcaacatagtagcttaaataatctaatccaaagttaaaatcatggttacctaaacagcgagcatcataccccactgcattataagcttgcgtaaaaatacgtaaatcactataatcgccagttgaatgagcataggaagcaagtggtgagccttgcaaacaatcacctgcatcggtaactacaacattgttatcaccatactttttcttttcagatttaataactgagctaactctactcaaactaaaaggagcatgatagtcggttttattttggtaatcagttggcaacaaaaatccatgtgtatcactagaatgtaaaaatactaacttcattatttctttttcctttttctaggcataaaaaaagacaccatatcaaaggtgtcctttaactagttattgctgttgtcgttgttatttacaacttgacgacccttgtaataaccctttggtgaaacacggtggcttaagcggtattcaccagtagttgcatcatagtgcattgctggaacactcaacttaatgtgaccacgacgtgaacgtttcttttgtttagaagtatgtcttgcaggaactgccatttaatttgatctcctttattgtagtcttaagcttcagggtcatataaccccgaatcactcacgtagttcaatcatactattcaattgctaataaatcaagatttattctattttcttctcttttttattgaagaaagtgaccttgtgatccgttttttccttagtatctcgtccaaagaaccaagcaataatcatcccgataatcaccattaccactaacacaacaattagtggtaacctcaccttaaaaaagccaaaattaattgcgacaggtgatgtatttaaaacaacaaaaattactgcaattaaagccacaactgatccaataattaaatttctttgtttttccatctttttttactttctagaagcaaactttaaggaaatcttatcaccaatcgatggaaatagattatacaatttagccgctacagctaaactaagtggtaaatttaattcacgtttatcactgccaaagaagtgaactacttgccaagcaacatcatctggatccaacataaattcttgaacatttttgacataatttccagtcttatctgctacattaaggaaattagtataaactggtcctgggtttacagtcattaccttgacaccaaatggctttaattctagccgtaagacatttgaaaattgaattacggcagccttagatgaactgtaagcggctgacttggtagttggtaccttgccagcaattgagccaaaattaataatttgaccagtcttttgttccatcatgaccctacctactaaacgagtaaagtacatcaaacctaaaacattaacttggaacatattggtaacgtcttgcattttttggtccataaattcttcgaatttaccaaaaccagcacaattaactaaaaagtcaatgtgttttacttgttcagtaattgcattaaaggtttgttcaatttcttccggcttacccatatctgttggaaaaacatatgcttcagcaccggatagttctttagcttctgctgcaatttcatctaattggtcctttcttctagcaattaaaattacagtagcaccacgaccagcactttcaagggcaatggaacgtccaatcccacttgaagcacctgtaattacaacaactttatttcttaatgagtctttcatttttctgagcctttcattggaatattaatctgatcaaaatcattaactaatactgtattagaaaatacttttttagcctgtttttcgagttttttccctttagcacccatataacgagcagaaatatgatttagacataataatttaacattatctttccgagcaattttggctgcttcaaccgaagtagaatgataataatcatgcgccaatttttgttcatcccctgcaaaagttgattcatggactaaaacatctgcatctttagccaaacgagcaatacttggcgtggaacgtgtgtcatagatgaccgtcacaattcttcccggtttagtaggtcctaagaaatttttaccatccaaaacagtaccatcagctaaagttactttttcgccattttttaatttccccaaaagtggcccattaggaacattatactgtgctaacttgtcaattaataattcgcctggatgtgaagcctccactactctaaaaccaaaactaggtatccggtggtctagttgctccgtatacactcgaaagcccttatcctcacagattaaccctgatttagctaattcaacaaaccttatagaatatgaaattttagtccgagataccttaagagctgttctaacaaattcttcaataccactgggaccataaatagtaataggaccaacatcaccttgaaaagaacgagttgacaataaccctggtaacccaaaaatgtgatcaccgtgattatgtgatataaaaattttggtaacttttcgtaatttaatatttgttcttaaaatttgatgctgagttgcttcacctacgtcaaaaagccagatttcattcaattcatccagcaacttaagtgcaacactagaaacattgcgttgctttgaaggttgcccagcaccagtacctaaaaattgtaattccatgaaaatcctattctaatctaaaattttgaatgcttaacaattgttttggtaactaatgcactatagtattttgagccctttaaattagggtgagtatgatcaccgtagaaccagtcaggatgattcttcgagtatgaataccaatcaattattataagattatgataccgttttgcaccttgatttagcaaattattcactgaattttgccaatctctagttggaacgtgaacattaatccagaaaacttttctcttaggtccagcctgatgcattattcgatcaagatcttccattgagaaaggtccattagttcctaaccctattaagatattatctgctaaaactccttgactttgataactatctaataagccaaaagcaacattcaattgtcttgaaacagcagcatcaattaacgctttaggcattaatcgttttaaatcgttgctcgaaccggccattaccgagtcgccaatcgcagttacttgaacatgttgagccaattgcaaatctaactgggaaataccatatttaacaaaggatttgttaataggatgctttttagtttgaagctcagcttcacgaataattttagattttttttcttttttctttttttctttttttaacttttcaattaatttagcattatccgttttttgttttttagaattctgattaattcgctgtgctaattggcttttattaaagtcttctgcttttactcctggtgaaatagcaatagctgctgatcctaagattaaaatcaaagctgctaaggctgcttgacctttcttaaagtaatcttttgtttcaaaattaaaaattcgagcaaaatattgcttcgttttatcccaggtaatcctacccattggtctttcaatcaaacgataagtaatttctgtaatcactaaaattaaaatcacttcaataaggtgatacagcattggattatcaccaatatttaccttatcttcaaaaaagatcattactggaaattgatacagatagatgccataacttcgcgatccaatccaatcaaataacctattagttaggatttgattccaatgactaccaggatgagcaattaccgctactaaaatacatacatctaaagtaaataacaacatcccgccagagtaagtaaaggcttgttgtggattcatccacttagagaaaaacattgctaacattaaagcaaatgaagcaaggcccaccaagtccagtatccagcctacttttcgttcaacttgctgatttaaactctctatcggccaaacaactgctaatgctgctcctaatcctaaagaaaagaaacgagtatcagttccataataaattcgattaatatcagcctttaaaaagtataggattgccatttctaatgcagaaacagctgatagaccaactaaaatccagaaaatattttttttctttttaaccaatttaactagtaaataaatgacaattggccaaacaatataaaattggccttcaattgacatcgtccataaattagtaaatggtgattcattagctgcaaaacgctcaaaatagctttgaccattatgaatttgccaaaaattaaatacatttaatagatttgcaagtacaacctgatttaatttagccagtaaatttcgttgaaagataaagatataggctgcacttaaccataaaacagtaattaattgtggatataacttttttattcgactcaaataaaaatgacgattattatatgatcctgttttatcatatgaattaaacatatgatctgtcaccaaatatcctgagagcacgaaaaaaatcggcactcccagatatcctcccataaaggaattaggatccaaatgataaagaattactccgataactgctaaggctctaaggccagaataccccgtaataaacctattttttttcataccctatctctactcttattgtacgaattcaaagacaaacttgccaatagccacatcatcaccattaacagctcctttttcacgtagtgcgtcatcaacacctaaacgcttaagctttcttgctaaacgcataataccgtcttggtgatccaagttggtcatttgaactaatctttctaattgttcacccttaacgataaattcatgttcgccaacttgctcaactgtaaattcattcttttgtggtgcctgatacttatattctttaatcttttgtgctagcttaggttgttcttcagcctgttcttgttcaacttcagttactaagttggcagtatctgacatcaacttatctacgcctttatgagttacacttgagatctcataaataggttcattatttccttctgcttttaatgcttttttaaactcagctagtttttcctcagcaccaggaatatccatttgtgaagctacaatcaattctcgcttctttgataaatctgtttcgtaatttttgagttcttttttaatggtatggtaatcatcaattgcctcacgaccattattaggatccattgaaactagatgtagaattactttggttctttcaacgtgacgtaaaaattgaattcccaagcctacgccttgactagctccttcaattaatcctggcaaatccgccattgaaaagtcacgaccatctggcaagataaccattcccaaattaggagttaaagtcgtgaattgataagcagcaattttgggcttggccttagttgttactgataacagtgttgatttaccaactgacggaaaaccaactaagccgacatcagccaataattttaattctaagcgcaaaacgcgatcttcacctggttcaccattttcagcaatttctggtgcagtattaacactagttgcaaaatggatattaccgcgaccgccgcgaccacctttagcaacgactagttcttgacccttttcagttaaatcaccaatcaattcattagtgtcataatcatatacagtagtaccaactggaacttttaaataaagatccttagctgcacggccatattgtgatttaatacgaccattttcaccactatccgccttaaacttacgccgatagcgaaaatccatcaaagttcttaagccgctgtcagcaacaaaaataatactgccgccacggccaccatcaccaccggctggaccgccattagggacgtatttttcatggcggaaagccaccatgccatcgccgccttttccggcttgtacttcgattttagtttgatcaacaaatgtaggcatgtatatctcttccttccgtcttaatctagcttttaatactataccacagaaatacgcatgatatcgcgttttctcggattacaatgttaattttaccgtttgtgcttgagtaagcgttaatcctgctctacgcaagtcatcaattgaagcttctttaattttcttcaatgaaccaaattcgcgcaataatttgttacgacttttaggaccaattcccttaatcgaatctaaacgactggacaaagcatttttagcatggcgtcttctatgaaaagtaatcgcaaagcggtgcacttcgtcttgaacgcgcgtcattaaataaaagccctctgatttgggattaaggggaatcagtttcaaaggaataccgttgatgggatcgccaaataataaatggtttgttctgtgcttatcatctttaaccatccccgcaactgggatattcaaatttaattcatttcgtaaaacatctaaacaagcatcgacctgaatttgaccaccatccatcaaaatcaaatcaggcattcttttatgctcgcgcaacagtctaccatatcttcggcggacaacttccctcgtgttgcgtacttcgtcgccaccattttgatgttcaacctcaccttttagcttatatttacgataagctgttttttcgggttcaccatctttaaaaacgactaaagcagagactgggtcagcaccttgaatatgggagtgatcaaaactttcaataaagtgtccatatggtaagcctaaagcatcaaaaatttctttttgagcgcctttagtttttcgattacctagttctaataatctaaacttatcatctagctttaacttagcattatccttcgccatgtctagcaatgactttttctgccctcgttgcggtgttctaacaggtaccttcaaaacctcagctaaagtagcattatcaaatccttcaggaatcagaatttctttgggcaaaaccctatttctttgcccataaaattgcacaataaaggaagtgaaagcatcttctggatctgtggcatctgtcaaaggaaacattctggtttctctacgcaataactttgcttgccgtaaaaagaagatttgaacagaaatccaagacttgtcaacgtaataattaaaaatatcacgctgcgtattatcattggaaataattttttgtttttcaaccgtttcttcaatatatttcaattggtcgcgaatttcggctgctcgttcaaattcaagattgctagctgcttgagccattttttcggtcaaactctgcttaacactagcaatatctccattcaaaaagctcttgatctttttaatttgctcttcgtattctttttgtggcacttttttaaagcatgcacctaagcactgccccatatgatagtaaagacaaggtctgccttgataaccatgacagcgccttagtggaaaaactttttgaataaacttcaaagtggcctgggcagcatatacattaggatagggaccaaaatagtagccaccatccttatgaacgatactagttaaccgagtttgcggatcatgttcacgcgtgatttctatgtaaggatatcccgtaccctgctttaattgaacattataataaggttgatacttttttattaatgtaatttcaagtaaaaaagcttccttatcagttgatacagtaatgatgtcataatctcgaatttcacgaactaattcagcacgacgtccaacctgtttactcttaaaatatgagcgaacccgattttttaaatttttagatttaccaacatatataaccgtaccgttaatatctttcatcaaataacagccgggtttttctggtaaaagttttagtttattctcaattaattgtgttgccattatctcatctcactgaaaaaatttgcatttaatagtttaacacagactgtttaagaagatcttaactttgcttatagaaatagctattcggtacaaaagttgatatattaaaagaaataaaatttgaggagaacttttgatgactaatctagtttttgacttaattaaccaatttggctacctagccatcagtttgctaattgcaatcgaaaacatctttccccctattccatccgaagtaattctatcgttcgctggctttgcaacccatcattctcaaatgaatgtcttcggtgtaattattgcttcaacaatcggcgcggtagttggtgcactagttttatattggattggcactttacttaatccagatcgattagaaaagttgttcgatcataagttattcaaactacttggctttaaaaagggtgatgtacaaaaggctatcagatggtttgataaatacggtaccggtgcaatcttctatggtcgctgcatccctgtagttcgtagcttaatttcaattccagctggaatagccaaagttaaattacctaatttccttatttacactagcttaggcagcttactctggaatgctattctagttggtcttggttcctatatgggtgaaaattgggaacaaattgtgttaatttttgaagaatactcattaattattggaggacttattctaattgctttaatatatttttcctgtaaatggtataagcaaaaaattaaagctgattaattcaaacgctctataaaaaatatagagcgttttcttcttttaaaaattaaaaatatcatgtaaaattaatctaatctataataagggaagtttgcgaatgaaatttaatatttttaggaaacaaaatgttgagaactatctcggtaaagacattaagttctccaaaacaatgaacgccgttgatttaatgtctcttggcgtaggagctgtcatcgggaccggtattttcatcttacccggaactgttgcagccacattaactggacctggcgttagtttatcctttgttgttgcagcaattgtttgtgctttagctggaatgtgttatgcagaatttgcttcagcgatcccagtagctggttctgcctattcatatgggaatatcgtttatggcgaatttacaggctggattatcggttgggcactgattttggaatacatgctatctgtagccactgtggcagcaggttggtcatcatacttcagttctttcattgcaccatttggtctaaaaattccacacgctatttctggtcctatgaatcttaacaatggcgtttattttgacttggtttctgttttaatcattttacttatcagtatcctgttgtcacgagggatgaagaactcaattaaaattaatgtcgtagctgtttttattaaaatcgccattattttaatttttatttttgtaggcttacagttcattaaacctaacaactatcatccgttcttgccatatcatttttcaggagtcatcaaaggagcaaccacagtcttctttgcctttcttggctttgatgttgtttcatcatcagccgccgaggttaaaaatcctaagaaaaatatgcccctaggaattattggcactttagctattgcagctgtactttattttggcgtttcaatcgttttaacgggtatggttaattataccaagctaaacgtatctaatcccgttgcttttgcattgcaatatgttcatcaaaactgggtagcagagttattatcatttggtgctatgctaggaatggctaccatgatgctgacaatgatctattcaagctctcgcttaatctatgctatggcacgtgatgggctattgcctagtgcattcagtaaattagataaaaaacataactctcctcaaaatgccttagtcgctgtcactattattattgcagcaggtgcagcattcttctccgttgatcaactagccaatttggtcaactttggtacactttttgcctttactcttgtttcctttggaattctaaaattaagaaaaagaacagatattgttaacgatggctttaaagttcccggatacccatatttgccaatcatttctggtttaatttgtatctttatgatttgccatttaagttcagaagtttacttaatggcagctatttggttaatcatcggtgctgtaatttactttatttatggctaccaccatagtcagcttgatcatgattaacatcagtaaaaattatgtaaagaaaaagacgattcgcatgaatcgtcttttttagctctgtttgaactagttaatttgattaattgcctgaccatctttaaagaaagacaaaacattattcgcagcttctttagacaaattaaatctagcaatgtgagtagctgaaccaacgtgaggcgtcatgatcacattatccatttcaaccaattcaggtcttggatgcggttcgttttcgaaaacatctaaggcggcgcctgcaattgaaccattctttaacgcagcaattaatgcatccccgtcaatcaacgatccacgagcaacattaattaaaaacgctgtgtctttcattttctttaaaaagtctgaattaaccagatgatatgtttcagctgtagcaggagtatgtaaactcacaaaatcagcttcttttgccaaagtatctaagtcaacatatttagcatctaattctgctgcaatttgatcatctacttgatgacgattatgataaataattgtcataccaaatgctttagcgaacctagcaacttgttgaccaattcgacccatacctacaattcctaaggtctttccttcaatggagtacccttggttgtcgtactcatcggcatttaaaaagacgccttcacgcaaagcatcgtcataataatgcaatctacgagctgatgccataatcattgtccaggcaagttccgccgttggacgcaacacactcttagggcaatttgaaacaactattcctttttctttagcgtattcaacatcaacgtgatcaaagccaacgccataagttgaaattatttttaaatttttcgcagcatcaatcatttctcgatcaaaagccatctttgctacgatcacaccatcatattctgcaatatgatcaagcacccactcacgatcatcttctggtcgatgtcctactggaccgatatcaacttgacaaatattttttaaatcagttaaggcctcatctcttaagccacctaaaactaaaacttttgctttattcattatttttagacctctattcaattttcatcttaaagtaaaaataccactatttgaaagagaaaacatctactttaatattttattgattgcaactgcaacaccgtcgtggtcacaatcagccgtaacttcgtcagcatgttgctttgtatattcaacagcatttcccattgcgatacctaatccagcataagttaacatcggcatgtcgtttgcttgatcgcctagggccatcacattacttcgatctatttttaagtagtcacatagtcttttcaggccagtccccttatcgacaccggcagcggttgcttcataataaaaaggctcagtctttgaaaatacaactcgatctttcatcatttcaaataaaggagattctattttatcatctaaatagtctggatcatcaacatacatacatttgatgattggtatctgcttcatttcttcttgtgtacgatatgagacttctaattttacgacccgtgaattataaattgtataatgtcccaaatcacggctagctgtataaattcgatctaacgatacgctatgaaaatgtaagtttagctttcgcgcaattgtctctaaatctacataatcttcatattttagcccctgtttgaaaataacctgccccgcggttgattctacaactgcaccattaaaactaactacatactgattttcttggccattaagccctaattcatctaaataacgttgagtatctgacaaaggccgacctgtgcaaattacgatttgcttgacttgtttttgagcagtcaaaattgcttttttaactgctggtgtaatctccttcttagaattaactaaggttccatcaatatctatcgcgattagcttaatttcttccattaccttttcccttaaaacaaagaaagcaccgcttatgcgatgctcctattaaacagccatggtctgcgtattttcttttaacttgaccaaatcagccatatcatcagcactgatttcaaaatcgatgttcaagttttcctgcatttctttaacattatcactcttcggcaaaacaatacaacctagctgtaagtcaaatgctaacattaattgagctggactaacatgatacttttcagcgtaagtcctgattcttggatcctttaacaaacgaccatgtgcaagtggagaatatgctttaatctgaattcctaaatttttacattatttcatcaaatcagttggcacatttcctatatgaacttcgatttgattaactactggcttaattgagctgttattaacaatgttagctacgtcttcttgtaaaaaatttgaaacaccaattgatctaactttaccggctttaagtgcttcttccattgctctccagttttccagattgccttcaaagtgacgatcattaattctattcacttcaatccaaggttgtggtgaatgaattaacaacatatcaatatattccaaactaaatcgatctaaagcgtcatcaattgcttttttgtaccttcatagtctttaatcgaagttggtaatttagttgttaaaaaatatcactactctcaacatcagagttccaaataccttttcccacaccactttcattgccatagtctttagcagtgtcgaaagcgcggtaaccaacattaatcgcttgacgaattacttttcgtacatcatcgttattaattagccaagttcctagttgaattcgaggaacctctactccgttattgagcattaaagttttatcagagtacatatatacacctctacattttactaatatgtctctgtttcttaattcctgtatttgtatagctaataacaattattaaacaataattgttttttcagccatctgttaatagagtacaacaaaattgttgcaaatcctatacatacattttattttttgtgattctgttatattttctaattaaaatagtagcatcaatcaatgctgctgggtttataaagattatcaaataatttattttattattctatacaaaattaatattttcgtataaaaaaagaaagggctgatgatgtcctatcaactctttctcttcagtctcttaattcccaacacctataataccagcatttatcatttaaacaaggataaaaaacatcttttacttacttttagttttcacattatagttttcatcacatgtttaaaaagcttagatgctatattacaaaatgattacaagagaaatatagatcatatagttcactattagctatatgcaaatactatattttttgagcaataagctgcaacaatttttgagcaatctttcgcttactcattttaggccatttcttagttgacttatttttttgtaaaatcgttacctggtcttcatcattgccaaaaacatttttagaaacgtcatttgctacaatcatatctgcaccttttgaagatagcttttttgcagcattttgtagcaaattattcgtttctgccgcaaagccgacaactatctgccctcgctgcttgtggctagcaacttcgcgtaaaatatctgtcgttttaactaaagttagagtcaaagtttgttgatcagcttgcttttttaatttatgatctgcaacttgtttcatgcgccaatccgctactgcagcagccataattaaaacgttactatgcttaaattcttttttgactgcaactaacatttcttcgctactagaaacatgaattaatgtaatcctaggattttgtggcaaaggcatacttacattaccatatattagctttacttttgctcccatcgctgctgcttctgtagctaaggaaatgcccattttcccactagagcggttaccaataaagcggacgggatcgattgcttcttcagtaccaccagcagtaataacaatattttttccttgcaaaacgttctgttgttcagtgaaatttttgatccacgccacaattgctcctggctctggcattcgtcctttagcagcatagccttctgccagcatccctactgcaggctccattatttctacaccatgttctttcagaaaagctatatttcgctgtgtagctggattattccacatttggtcattcatggctggtacaaccaatttaggtgcacttgtagctaaaattgtagtgctagctgcatcgtcagcaattcccgttgccattttagcaataaaatttgcagtcgctggtaaaaccagagctaactctgtccaacgcgctagatgaacatgtggtatgctagactgattttccttgctccataaatcatccaaaacaggatactttgttaaagcagccagtgtattagtagttacaaaatgctctgcatttttagtcattactatttgaacttgatgacccgctttttctaaatcgcggataacgttaactgccttataatcagcgattccacctgtcatataaattgttattcgactcattttaccattcctcgtcatctaaacttatttttattttatcattgtccacttaaatagtagaatattgtgttgggagttatatttggaggaaaaattgaaaaatatgcaaaaactacttttactaactatattcttacttagcttatcggcctgcactaaaccacaattatcctctgtaccacgtgataaaagtgccactacaatcaagattgttgataggaagcttgagttgcatcagcccactaaaaggccacttcaacctttaaatggaattttgcctcattggctgcaaatgctagataaatctctgcctaagccagcaatttatactaatttgaatactgttcttaaaaacaaatagggaaatgattagtttcatcttccctattttttgttcaatttacaagttgctttaaaaatagttgttttatattaatgagtaatttaaaatttatataatacagaaaggaactttatatatgccaaatttatccagtgatttaacttcaactattaatgagagactaaacaacttgaccgcatctaaaattcgagcatttgaccaaaaggtctctgaaatttctgggattattaagttaactattggtgaacctgatttagcaacacctgatcatattaaagatgccgcaattcgtgatattcaggctaatgattcccattatgctcctcaagctggtaagccagaactacttgaagctattagcaattaccttgaccgctcaattggtgtacattatgatccaaaaagtgaaatctgtgtcactgtcggtgcaacaggtgcattaaatgatgtctttatgaccttgcttaaccccggtgacaaaattttggttcctactccggtttgggctttatactttcagctaattaaaatgactggagcaatccctattcaagtcgatactaaaaaagatgacttcatcttaacagctgaacatttacgtcatgttctcaatggtcgcggtaaaggtgcaaaggcaattattttaactgatccttctaatccaactggccgcgtttattctgccacagctctaaaaaccttagcagatgtcattaaggaatacaaaatcttttctgtaactgatgaaatttatgcagaacttgtttatggcaaagccaaacatcactcactttctgaatacatccctgacagaaatattttgatttccggtttatccaaggcttatgctatgactggctggcgtttaggctatattgctgcccctaaacaaattatgaagagcatccgcaagattaattcatttttagttacttcagttactgataacgttcaaatagctgctgtcgaagccttaaacaatggtcaaaacgatcctaaaaaagcacgcgaaatctacgaagcacgtttaaactttatgcaatctggcttagaaaagttgggctttgaaatggccacaccgcaaggagcattctacatttttgctaagatccccgaaaaatatggcaccaatgatgagcaattcgcttttgagctggctcaaaaagcaaaagtcggtgtcactcctggtcgctactttggcaagggcggtgaaggttatgtccgtctttcttatgcatcatcaactgagcaattaaaagaaagtttagctcggattagtgatttcgttaataatttataattcagataaaaaaataagtgatctcaatcaaagtgatacaatcccactaaagtggacgattgaaatacataaagtattcaattatccatggaggtgggattttttatgtccagaaaaagtaaatattcattcgatcaaaagatatgggcagttgaacaatacttgaatggtaataggagcagcgttgaaatagctaaacggcttaagatgccaagtaaaagtggagcgatgcaagtaagaagatgggttcatcaatatcaaagcaatcgtgatacccttctaagtaatgctcaatacaataatcattactctaaggcatttaaagaaaaggttgttcaagaatatttagctggcaaaatgtcgttaccttctttagctaataaatatggcattagaagcaatggaacagtatcagaatgggtttccaagtataatagtcatatagaaaatcgggactatgatccccatccggaggtctatatgactaaagcaagaagaaaaactacccagcaagaaagaattcagattgttcaatactgtcttaatcacgacaagaattacactcaaacagctgtcaaatttgattgttcttaccagcaggtttacagctggacacacaaatatctagctaatggtgaaacaggattaacagataaacgaggcagacataagaagccagaagagctaactgagttagaactggctaatcgaaaaattaaggaattagagcgtcagctcaaagaagaacaaactaagaacgaattcctaaaaaaattagatcagttagaaaggatgtgcttgccggacaaccaagatacagacaagccgcaataaaaagacgctggaaacaagaaacatatcagttaatccatgactgccatcaaaagtacaattggaagattgatttaatgtgcaaatgggctaaaatagcacgctcagcttattacaaatactttgatcctaagcgcaagccgagtaagcgtgaagaacgagacaaaaagattgaagcaaagatcattgaaataaccaagtctaacaacagtctgtttgggacggaaaagatgaccatggcagttaatcgacagatgtctgatgaaaagccggtttatcataaaactgtttaccgcttgatgtgtatcaatggcattagatcacaaaagcctagataccagaagctaaagttcaagcatacaacgcctgagaaaacggccgaaaacaagttaaaaagagactttaatgcatctagacctaatgaaaaatggtgtacagatatcactgaagtcgttgctgctaacctgcctaaggcatatctatgtactgtgtttgatctatatgatcgctatcctgttggctacgcaattagtaaacgaaacgatactgctttagttcaagcagcctataagcaggctgttaaagcataccctaatgctcatccgcttttccatagtgatcgtggttttcaatttactcgcgcacctttccaaaaccaattaaaagaccaaggcatgacgcaatcaatgtctcgtgttggctgctgtattgataatggtccaatggaaggctggcaaggcattatcaaagaaatgcgagttattcttcatcctcaagtggccagttatgatgaacttaatgattctatttgtaagacaatagattactacattaatgaagatccacagaaacgttttaacggtttaactgctggtgaaatgcgcaaagaagcgatgaaaggcaatattaagaattgccctattgcaccaaatcatcgaattgagaaatactggcaaaaaatacacgaaaagaaaataagagaagccaaaaaatcctcagctgattattaatcaactgaggaataaaagctttatgtaattctactgtctacttgacagggaatgtatcaaagcgagatcacttattttttattatattgatttattacttatcccaagttgaattttctgcagcatcttcagcagccatcttttcaagacgctcttcagttgcctttacactgtcttggtacttttcctcaacttcgatccccaagtcagctaattgttgatcagctactggagctggagcatgcatcattggttctgaagcagaagcattcttagggaatgctgaaacgtcacgaatattatccttatcagcaagcatcattgcaaatcgatcaagaccgatagctaaacctgcgtgaggtgggaagcccatgtccaaagcatccatcaagtaaccaaattgttcatatgcacgtttcttagtgaaaccaagtgccttaaacatattttcttgaattgagcgcttgtggatacggattgagccaccgcccatctcatcaccattcataacaatatcataactacgtgcgtgagccttatgaggttcagtagttagcaacttaaccccttcatcatctggcatagtgaatgggtggtgagctgctacccaacggccaagtccttcatcgtattcaaataatggccaatcaacaacccaaacaaagtcataaacacccttaggaataataccagtttctttggcaaattcacgacgaaggtggtcaagtgaatcacaacataccttccacttatcagctacgaatactactaattcgccaccttcaagatcaaattccttcttcaaagcttctttgttctcatcagtcaagaagcgagcaacagggcctgaaaattcgccatcttcaaatttaacccaagccaaacctttagcgtggaatcgtttaataaagtcagccttcttgtcaatcttcttacgtgagtattcttttgcaccatttttaacagcaattcccttaacaaaaccgccatcagcaattgcaccggagaagaccttaaagtcactatccttgaaaattgggcttaagtcatgaatcaacataccgtaacgagtatctggtttgtcacagccatacttgttcattgaatcagtccaagtaattcgcttaattggagttttaagatcaatgcccttgacatctttcataattttcttcaaaagaccttcagtataactctgaatagtttcttcatcagcaaatgacatttccatatcaatttgagtaaattctggttggcggtcaccacgtaggtcttcatcacggaaacaacgagctaactggtaatacttgtcaaatcctgcacccattaaaagctgcttgaacagttgtggtgattgtggcaaagcgtagaaactacctggatagattcttgatggtactaagtagtcacgtgcaccttcaggtgatgacttacctaagattggagtttcaatatcaataaaaccattttcatcaaagaattcatgagtagcacgcaaaatctttgaacgtaaaataattgcttgttgaacttctggacggcgaagatcaagatagcgatactttaatctagtttgttctgagacttcaattccatctttaatttcaaatggagggttcttagccttgtttaaaataatgatttcagttgcatcaacttcaacttgaccagtcttcatgtcagggttaacttctgaacgcttaacaactttccccttaacttgaacaacatattcattaccaagtgaatcggcaatatccattaacttcttaccagaatctttgttaacaacgatctgaaccaagccttcacggtcacgcaaatcgatgaaaaccaagttacctaagttacgtacacgttgtacccaaccatagagatttacatcttgaccgatgtatttttcagtaatattgccacaataatctgttcttttttcgatcttttccattgttactagtccttcaattcatccattattttagtcatgttatttagatcttcaagacttaaatcgattgtcttgccatcagctaaacgtttaatattcaaaacgccgttagccagttccttttcacctaaagtaataacatacttagcaccttcacgatctgccttcttgaattggttctttaacttcttctgattgacatcaaagtcagcttcaaaaccttgattacgaaggctacgtgcaatttcaattgccttttgtgcagtaccgtcaccaatattagtaataaagaaatcaataccgcgtttctcgaataatgcaggattttgctttttaagcaccaacatcaatctttcttcgccaatcccgaaaccaacggctggagtagcgggtccattgaattcttctaccaagtgatcatatctaccaccaccaagaatagtagttgcactttcccataagctcttatcttcaaccataaattcaaagataattccagtatagtaatcaagtccacgtactagatcatcatcaattacataatcaataccaagttgatctagcatcttcaagattgcttcaaaattagcttttgaatcgtcatccaaaaattcacgaatcttaggtgccttaggcaagaacttcttatcacgttcatctttagaatctaaaatacgcaatggattatcacgcaatcttctttgtgagtcttctgataactcatctttcaaaggagtgaaataattaaccaaagcatcatgataatcttgacgtacttgctcattccccaaagtgttaatgtgaagttggtaattcttaacgcctaactcacccaataaatcatgtcccatcatgattgtttgtacatcacttaatgggttgcttgagccaaagctctctaccccaatttggtgaaattcacgttgacgaccggcttgtggtctttcatatctaaaagttgattccatataaaaaacattaaatggcttaacaacttctggcgcatacatcttgtcttctacataagcccgcactacgctagctgttccttctgggcgaagggcaatatggcgaccacccttatcatcgaagtcgtacatctgtttttcaacgatttctgaactatcgccacttgaacgagcaaagatttcataattttcaaaacttggtgtgcgaatttcacgataatttgcgcgattgaagaaatttctggcagtttcttcaactttttgccatgaaccagattgatcaggcaaaatatcaactgttcccttaggtttttgaactctcatttaatcatcctttttatattttgataacttgattaaaaataaaaagcgcccttgaacttaatcaagggcgcttagattagcacggtaccacctttttggttgctgcgattaacgctcgccaaacgatccattatctgttaaaggtgtcacagaccgcgatctatctactctctcaccacaacgagcagtctctttgaatagatcattgctaatctacattctttgtcatcgataattcttacttagcttatatttttctcaagacattgtcaacctttgcggtctcattttttcgctaaagatctaacacaatcgtgaatggaccatcgttttctaaactaacttgcatgtcagccccaaactcaccagtctcaacgtggaaaccgtcattttctagttcttgattaaagtcttcccaaagttctttcgatcttggtggacgcatcgcatcaacaaaactaggacggttgccttttttagtatttgccatcaacgtaaattgtgataccgacaaaatttctccgttaacatcctttaaagacaagttagtcttcccctcctcatcttcaaaaatacgcattttagctattttatcagctgcttttttgattactggcaattcatcaccatttttgatgccaactaataataaaaagcctttaccaatcttgcccacagttttaccgtcaatatctacttgagcatgatttactctctgaattacaactcgcattaattatctgacctcttagtttcgtatacgtctggaatatcacgtaatttactcaaaatttcatctagttgatctgcattccgtacagcaactgtgacatacatatgtgcaacattatcttcgtttactttaccagaaatattattaatattcttagtaagtgaattcaacttattaataacgtcactaagcagattggaacgattgtaaccaaagacttcaatatttgcattaaaggattgaacactattttcctcaacattttcccattcaacatcaattaagcgaccttgttcttcagcttctttggtgatattacggcaatctgttcggtgaatagttacaccgcgacctttagttacatacccaataatcttgtcacctggaactggattacaacacttagctaaatgaagcattaagtcactaacgccttggatcatgacgccatttttatgcttaaccttcattgtagtatttgaattcttcttaggttgttcttcttgaactgcttgttgtccagaattcaaaatcttttcttccagctctttttgtttttgattttcttcctcacggcgcaaatcaaccgtcaagcgattaaccactgcttgagcagaaagatcaccaaagcctactgccgcatatagttcatctgcagtgtgataattaaagtgctctaatagcttttcaattcgatccctggccataaattctttgggtgaaagatcctcatcgcgcaacatatcagcaatcaattgttcaccatgctggatgctatcttctctatcctgacttctgaagtagcgtctaatcttgttgcgtgctcttgaagtcttcaccatgtcaacccagtcacgcgatggcgctgcattagtctgtgtcataatttcaataacatcgccattgcgtaatttatagtccaaaggaactaatttgttattaactttggcacctactgcatgactaccaacttgagtgtgaattgcataggcaaaatctagcgtaaccgaacctttaggtagttcatatacttcacctttaggcgtaaaaacataaactctgtctgaaaaaatatcacttttaacagacttcataaattcaccggcatctttagtttcatcctttaattcaaggatttctcttaccatatccagcttttcaccagaggtactttgctcaacaccagtaaaattgccacgcttataagcccagtgtgcagccacaccatattcagctactttatgcatttgttcagttctaatctgaatttctagtggacgaccgccaggcccaataatggttgtatggagtgattgatagccgttaacctttggcatagcaatgtaatccttaaaacgacctggcattggcttccattcagtatgaacagcacccaaaacagcataacaatcacgcacatttttaacaattacacgtacagccaataagtcataaatctcatcaaaatctttatgcttattaaccatctttttatagattgaataaatatgcttcggacgaccataaatttcatatttaatgcctaattcatttagagtcttcttcaaagtcttgattgtatcggcaatatatttttcacgctggcttcgcttgacatccatcaagttaacaatgcggtaataggcttcgggatttaagtagtggaaagacatatcttctagttcccacttaattgtcccaatacctagacgatcagccagcggtgcataaatatccattgtttcggaagcaatacgccgctgcttatcaggtcgtaagtgttgcagagtatgcatattgtgtaaacggtcggctaacttcaccataattacacgtagatcttgagccatggcaatcaacattttacggtgattctcagctaaaaattcttgatgagacttgtactcatatttgtttaacttggttacaccatcaacaataaaagctacatcttcaccaaatttttccttcagctcatcatttgtaactggggtatcttccactgtatcgtgcaaaaagcccgctgcaactgtatcaggatctaagcctaatgtagctaaagttccagccacttgcgttggatgaataatataaggttgtccagacgcccgtttctgtccagcatgagctttattggcaaattcatatgctttttcaacaaaggccacctggtcatcattcatatactttttgcaggtatcaattacctgatcatgcgtcatttcaatgtatttggacattatgatcatcccctctagcggtaaatatttttattcattaagccaaaagcttcaattattaagtaaattaaaccaaacattaaattatacaaagcaaaatgtggcaacattgctaagcagaaaagcacaggtaacaagaaaattcaccacttggacaggttaagtttaataattaaattgcctagatggtatgcaatgatgctgttaataataaaaaacagaattgcttctcgccacactaccggcacacggcaaatgctaaagatatacggcaaaatcattaccaaaatactccaccagacaagtgacatccagcgatgagaattcaacttcctgacaattggaattgcttcgattttatttcctagttttttcattaaaagattgtgcctctcatcaaagtttaatttaattgataatattttaccatatttatttttcttttctagtaattgctagtcccatccagcgaccttgacgcatggttaaatcgaccttaaagccattctcgtctagagccttttcaatcttaggcaattgcaggtagtcaattccagaaaagataacttgaccatcgtcgtttaaatgactatccatttgtggaatcaagtctagtaaaatttctgccaaaatattggcaacaatgatgtcaaacttgcctttaacatcagctaacaaactagtcttttgagtgtgaatattattaatatcgtttaaggctgcattttgtttagctgcagtcattgattcatctgaaatatctgtggctaaaacatcagttgctcctaattttgatgcagcaattgccaaaataccggaccctgtaccaacgtccactacattcattggcttaaccattgctctctctaggcccatcattgctaattgagtagttttgtgatttcctgtaccaaaagctaagcctggatcaagcttaattaattgctggtccttaaaagcgggtttgtaatcttcccattcaggcacaattgccaagtgacgtgaaaaatcaatcacgtgataatacttttgccatgccgtgttccaatcttggtccttaatgtatgaagttgtaattttggcatcccctacatctaggccatagctcttcaattcctttaacttatcttggaatttttttactaatgcgtctttatctgcttcttcatcaaaataagcatagaaatatgtatccttaggtaagtctttaatgtcatccatttcaactacagtagaatcatgcaaccagcctgcttgctcaaagtcgctacgctttcttgattcaatacccaatgcattcagattatctaaagcaaaaacgctcaaagcgtcttcaacttcatgactagtatcaattttaataattagtaatttcattagtattatctcctttgggattttctttgcataatgctatcatgataacaggtgataaatatgtcaaagaagaaaaataaaaagaacaaactcgaaaaaacattggtcgaaaaaatcttagaccaaaataagatcaagtatcgtcaagctcaatttgctgtctccgaagataaaggcggagttgcacaaatgaacacttctattttagaagacaaagagcgtttagtctataaaactctcgtctgcgaaggaaataaaactggtccattggttggtgttgtaccagttactgaacatttaagcatgaaaaagttagctaaagtttctggtaacaaaaaatgtgaaatgcttcccttaaagaaattagccaaaacaactggttatgtacatggcgctaatactcctatcggaatttattttaaggaaaaatttcctatctatttggatgattctatgcaaggaaatcctgaaattggtgtttctagtggtgaagttggccggagtgtctttttgaacccagaagacttagccaaattctgccatgctccttttgttgatctaaaagaataaaaagcgcttacaatttattgcgttattcttcttcttttgtgttatattaaataatgtaccgcatacagaatataacaattacatagaagaagatgacaaaaatgaatttattgttaggaattgttggctttgtagttgccatgatcgctgcctttgttgttacggcattagcaattgccaagtaaataaagcaaaaaaataataacagatttaaaatgacgtggtttgatatcatgccattttttattttttatataatagttatttattatcaaattataagtatttaatatataaggctaaactatttatactaaaaagaaaagtcttgcctataaaaaaagttgaatttatatcagcaatgttatttatttgtgctaatctaaatatgttgtcaaatgtaaaaagaacacattgataataaattgtaaaagactcagtcttttacgttcccaaaagaaggtttagataaatgaaacacaaaaatgatttgagcttcaatgcaaaatttaatggaaaacaaaaatttggttttagaaagttgtctgttggtttagctgcagttgcacttagcactacttttttcttaagtaatagtcaacttgttcatgcggatactaatactgcgactaatgaagaacaaactcaacaagattcacaaaaatctaatcaagaacagtcaaataataccatccagtcgactcaagctgatccaagtaaccaaaataatcaaagttcaactaaaaattcaccaaaccaagaaaaaacaaaacaacaaacagtcgaaattaccgctttttatacagatgaaaaaggtaataacgcttctgaaataaaaaaagatgaatcagcttctttaatggctggtcaagataccatcaatgttgacattaaaatcaaccagcctaaattagatcaaaataattctttaactattaacttgccagatactggagaaagtaaaaactatcaaattaatactggaaaaacaaagattttcagtaataatgccggtagtcaatcttactgggatattacggcagtcgatcataatgacaatagtcaacttgttgccgtttagaataattcgattagcaaagattcacccgactaccttgatttaaccatcccagctcttgctaatggatccacagttaaatcagatttaaaaaatcaggctttcaatgtagaaattgatggaaaaagccaaatcgccttcacagctgatttaacaccttacaaggataaagttacccccccaactgaattgatccatggctttgctatgggacaaaagtcattcaacggttctgatgatggtaaagtatacccagagaaaaacaatatctcagaagaagatattaaccaattaaaattaaacgatgacagtcacctgcttcaatggggaatctatttcaattatggtaatcaattaaataatcctcccctttccttgtataatgcaatatttaaagttgcttttagtcaagatcaaactttaattccttcttcaatcaaagtcttcgagattccaagtggaatgtccgtggatcaaaatgcattacggcacggaattaaggatttttacgatggagctgataagtccgatgaaaattactacagcataattgctactggaaataatgaaaagacaaaatttgcggactttttgcgtgctcatttagttaaaaatgcaactggacaagctactggtttctcagtaaaccaaactggtcaaaaattcaatcctaatgatcctagttatgactacagtacccatgcatacttcattcaattagatactgtactaagtaataaatctggccaaccaactagtagtactggcatgacctctgatacatcaaaaaatactttagctggtcaagggcttagtgctgattacaaaaataaagacgaccaatcagctaatacccctattcaatttagcaggttagaagaagcattagctttatttaaaaataagcactataaaattgaaaaagtttctggcgccaatgccacattaaaaacggacagcagtatcggctttggcaacttttataataatgaaaatgtagatcaacacttcatcatttacttagttcatgaaacgcagatagaaaagcaaactgctacagttggggaagaagtaaaaggctactatgtaaacggtcctaagagccaaaacttttccggtataaataatccagatgtggctgttcctaaaaatgatgaaacacctactccaaatgtagtaaaagaagttatttactctagaagcagggtggttgatttagttaaggatccgcaaggcacagaaataaactggtcacaatggatatcaaacaatcaagcattttcagctattccgtataacaatactacaattaaagacataattgatggccattatcatttagataaaaatggcgtgattcacattgcttcttcacagaataaacttactgctacaagcaattcaattactgagatttccgcaattgcacctaattcggagtttttagcttcaattgcttctaccacagttaatggtcaaaaaacaacaactggcaatctagcaactattagcatttgggtaccctatagttactccgcttctaaaccggaaccaaccccaactcctattcctatacctgaatctgagactccgactactccagaacaaccgaagcagccttctgagccgaatacaccatatgagtctgaaccacctaagtctatgaatacaaacagacaaagattcacaaaaaagtaaattggaattctagcagtcatccttatggcactgatatgcaaagacagaagcaacacaaagatggaattattccaccccatggaactgccattaataatattccaaattcaacaacaaagactagaactactaataatatcgttaagtcttacaataatattagttctaaattaccacaaactagtcaaaataattctaacctgagcttaatcggtctagctttagcaacactaggactactgggatttactattacaaaaagaaaacatgattaattaacaatcgcaaactaaaagagacagaccaaaaatctgtctcttttttctaccttaatttatttaatctgcatgtctccacttcttatcagttaagatacgtgcagctaaaagacctaatggcaaggccacgacaatcatcaacgcttctacgatccaataagccccgatattaatattcgtgattccaaagttaaatacagctcgatacatgtaaagaccaggcaccataattacaattgatggaacagtaattgcaattcttggaaaaccaacttttttccttacaatacttgctaatagaccagctgttaaagcaccaataaatgctgccaaagctggagcaacctgagcataatcgactaagctaagacgtaatgtatttgccattgctcccattaccgcggctgtagctgccatttgtggtcgactgttaaacataattgaaaaaccaaacaccccacaaaagctagccagcaatcgcaagcaggttaacgtccctggatcaatttttaacttaggcatagatcctggatgcaaacgcaaaattgttgctacagcccagcctgccatcgttgcaattacgataattaaaatcgcataagtgagccgttcaagcccagagcgcatatctaacttagacatgtccaatccagatgtaataaatggaaaacccggaattacgaacaacatggcaccaatatagccataggcatgatcatgattaatgtggaataatatttctcctacatgaaaactcataaagtaaacactgcaggctatggcaaccgcaaccgcaatcttggctaccaaagttaacctgtgcttacccataattgctctaatatattgaccgcaagctgcacccaaaaaagcacagatcacctcaggaagaccgccgcctaataagaaaataaagccgccgcaggccaagcctgaactaagtcccgaaattaacggagaatacgctgacttttgctgagaaatctcccgtaagcgtttatgaatttgaccgatagtccattccccatgtcccttttcaaattgccgaacgaatttttccatttcattcaacttagtcatattcacacctgttgctggtaacgataaagtctgggaatatgattcattatcaacatcaaaacaggtatattcaattgacactaatccaatatccgttgaacaggtaatgcccaaggttctggcaaccgtatccattgaatcacgtactcgccaagcacctgtaccacagcttaaaagcataatacctactcgacctacaatcgaggtcttttcaactaatgttgcatcctgcgccatcgtattattatcgctcttgaaaaattcctcccacagaatcttcatatgatgtttttctgataaatgatgttctcgatcaatttcactcatgctattattacttttcctcacatagttcgcataattataactattatattctaccacaggaatttcatcataatttttgatattttaaaatttgccccggatttaaaattcccggatttaaaattgaagtgcaacactaagtgttaaacaaaaaggccatgaagacctaaacttgaagtgaccaaaaatcaagaaaggaagatcttcatgaccaactcaaattctagcatttccaagcattatcatcaattgaacagcgaacaacgtggacaaattcaagctctgcttgattctggcataacctcctgcaatgctatcgctcaagaagtaggctgtcataaatcaactatcagccgtgaaattagacgaggcagtgtcctgcaaagagacagcagctatgtcttgtatgagcactattacgctgatactgcacaaatttatcatgaaaagcgccgcagaaactgctataagtgtaatccactgcaacactatgccgtctttttcagaatgctaagcagacgctttaaagccaaatttgatgccaccagcattgatgaattcgttggtgaatttcacaggattatgccaaattatccatgtcctagcacgcccactgtctatcgttatattgatcaaggattgctggatataagcaatatcgacctgccaatgaagcttaaaagacgcagaaacaaacgccatcatagtcatggtggccatgctccgcataaaaagaatcttggcaattcgattgaacagcggcctaaagaagttgaaaacagaaaagttcccctgcactgggaaggcgatttggttaaaggcgtcagacgtaaaaatcaacctgccttaatgacactgactgaaagaaccactcgttttgaggttgttatcaaaattcctgactatcgggccagtacttgtcaaagactgcttcaaaaggagattgacagacatcctaattggtttaaatcaattacgtttgacaatggttctgagtttgcggatatgaccaaaatcaaaggatgtcagatctactttgctcatccatattctccttgggaaagaggcacaaatgagaactgcaatggacttctgcgtcaattcttccctaagggcaaaagcatgaaagataagtcagctgcttatgttcaacaggcaactgatgccattaaccgcaaacatcgtcgaatcctccaatatcacacagcagaagaactcttcaagcaatacgttccttcatagcctaactgttgcacttaatttgacaattcaggaaattcttttctttaatataaggataccctcttagtaattcttctacaaatttattaaatagattgaatctcccaatcagcttgactgttaccgcttactaattataccttgtaaatatactaaattttggagaaaaatatgcatactaagggtttatcagttaaaaatgttgtagcgatcggaattggatcggcaatctatgttattttagcacgtttcacatcgattcctacgcctattcctaacacaaatattgaattagtctttccttttttggctctttttgcgtcaatctatggcgctaaggtcggttttattgtcggctttattggacatgctttgtccgatttcattatgtacgggcagacttggtggagctgggtattagctactgctgttttaggctggatcatcggtttagcggccaaacgcttagacttaaaaaatggtatttttggtattaaacaaataatcttttttaatatcattcaaattattgccaatattctcgcctggattgtagttgcaccaatcggtgacattatcatctatagcgaacctgctaacaaagtttttgtccaaggaatttcggctacgctttctaatggtattacaattatggtcattggcacgctcctacttaaagcttatgctggaaccaagattaaaaaaggcagcttgcgcaaggaggattaaacaatgcctaaaacaattattgaattcaaagatttttcatttaagtatgacagtcaggccgagccaacactaaaacagattaatctaactatcaaacaaggtgaaaaattgttaattgctggaccatcaggttcaggtaaatcgaccattggccgctgtattaacggcctaattcctaatctagatactggtgagatcaccggtgaatgcactattaacggcaagaatattaaagacactaacctatttgatctttctttcaccacctcaactatcctacaagatactgacagtcaatttatcggcttaactgttggtgaagacattgcttttgctttggaaaacgactgccaaccacaaaatcatatgaaacaagttgttcatcgctgggctgatgaattagggattgagcatttattaaagcaggcgccacaaaatctatctggtggtcaaaaacaaattgttgctctagctggtgtcatggttgatgaatcaccaattttactttttgacgagccacttgctaatttagacccagcttcaggaatgaaaacgatggctttaattgatcgcattcaaaaagaattaagtgcgacagtaatcattattgaacaccgtctagaagaagttttgagtcagcctatagatcgcattatcctaattaatgatggtgaaattgtagctgataagaagccaaatgatctattacatgagaattgtttagaagacgttggtgttcgtagtcctctttatttaaatgccttaaaaaaagctaacgtcgaccttacgcgtattcccgacctaacttcagtcgctgctttgccccaagatcctgaaattgctaagcagttgcaagaatggcaaaacaacattaccctaagtggtgaaaaagaagagactcatcctttattagaactcaaaggcgtcggccaccgttatagtaaattgcagattcatcctttacatgacgttacagcgacaatcaatcaaggcgattttgtttcaatagttggtcaaaatggtgcgggaaaaaccaccctttgtcgaattatttgtggctttatcgacaatgagggacttattttatttgatggtgataaccttaagcagttttcaatcaaagagcgttccgataagattggttatgtcatgcaagatcctaaccagatgatttcacaaaaaatgatttttgacgaagtagctctaggcttgcgtctacgtggttatgatgagcagactattcgcactaaggtctatgatactttgaaagtttgtggtctttatccgtaccgcaactggccaatctctgctttatccttcggtcagaaaaagcgagtcacaattgctgcaattttagtgcttaatcctgagttattaattcttgatgaaccaactgcagggcaagattggcaaacttatactgagatcatgaactttttaaaacagcttaatgatcaaggcaaaacaattatgattatcactcacgatatgtacttgctgatggaatacactaacagatccctggcttttgctgatggaacactaattgctgacacagatccaatcaagttattaactgaaaaagctttaattaaaaaggctgctttgaagcgaacctccttatataatctcgctatcaaatatcaattagaaaattcagatagctttgtccgcgcctatattgatgcagaaagggatgaaaaacatgcataatgaaagccaagttttaggttatcaacctggtgattcttttatttatcaattaaacgcaaccactaagttagtttttatactcctagtctcggttgcttgtatggtaacttatgataccagattcttaattgctatctgtattttatcaattttcttgtttaaagaggcaaaaattaagtggagccagatttcttttatcgtgaaatttattgtagttttcatgttgctaaatctgatttttgttttcatctttcagccaagctatggtgaaaatatttatcattctaaaagcatcttgatccatgccggctacttcacattaacattgcaagaggtattctacttattcaatcttttcttaaaatatgtctgctcaattccaatcgtattgctgtttctattaactactaatcctagtcaatttgctgcttcattaaataaaatcggcattagttacaaaatttcctatgctgtttctctagctctacgctacatcccagatatccaaaattcttattgggatatctcagctgctcaacaagcacgtggcaatgaactatccaaaaaggctagtttaggcaaacgaattaaggggacattgaatatcgtgatgcctcttatcttctccagtttggatcgaatcgatacaatttcaacagccatacaattacgccgctttggctcaaagaaaaaacggacctggtatgtcacccaatcatttaaaaaagctgattatcttgtaatgatcgtagccgtgattttggtattaattgtggttggtctctggcaacttgatcatggtagattttataatccatttatttagactaaaattaaaaggacctaatggtcccttttttgttttcgatttttctgtttatgatcatcttgagtgacaatctcaggtttcttaggaatcggcggcgtgattatttcataattacgcaaacggtgttcaagatagtcatctaatcgctcttgcgtattttcatgtacaataatcattaaatcacctcacttttcataattatacctcaaaaatgtaggttaaacagcgtaattactaagtatgccattccactagcaatcacaggacctgcagctacacccttgaaaaccactactccaataatagtacctaaaactaatgcaaccgtcacctgtggcaccgctgctaattgatcaacaccataacgtgacaagatagctacagcaattcccgctaaaatggcaatccatccagctggcgacttaaaagttttaatcagatccttaaagccaatctgtcctgtcgcaataggaactagaattgcaaccgaaataatagttacgccccaattaatcccctttgcttgaatagtaggcagccatttactagtaaacggtaataatttaaacaccattaccactcccgttgcaataattaatgacatgtttttacccactaacgctacaactagcaccaatgctagaaataaccaactttccatatttatctcccctcaaaaaatcattagcattagttcactttaacaaaaatattcatcaaaacaaaataatgagtctaaataagtgaaaatcaatctaatttgtgtcataataaaattactcagaaaaatatatgtatacgcgcacctcgttcttaaaacgaggtgttttttacgcaaagaaccagtgcagatattttaccttcactagttcttcttagttgatcgatattgcgatatgactttactactgcatcgtagttagaatttgcaaatatttatgcttgaaaataaaatatttgcacaaataattaaaaaacgtttcttgcaaaaatacaactaaacattttaataaaaacaaaaagatgccactttcgtgacacctttgtgattacttattcatacatttcgttttgaactaatccctaacttccttaatggtatcaatgatagtaccatcacgatactcaactaaggcaaccgtacgatcagtatattcaagtggctttggtacaccaacttgtttttcagcaattttttgcaattcattaatatccaagatcttaagtcctggcaccttactaaaggcatccactaaatcctggcgagctggattaatggaaattcctctttcagttactaaaacatcaattgatgaacctggagtaacaatagtttctactcttggaacaacagtcgcattacgtccccgaacaagaggagctgtaataatcgtcatcttggcaccagctgcggaatcttggtgaccaccgacggctccacgaatgacaccatctgagccagtcataacattaacattgaagtcaatatcgatttgtaaagctgacaagattgaaacatccaagttgttaaccactgcacccttattatgaggatcagcataccaagaagcatcaatttcttgttgatttttattgttagccattgattgggcagcacccttatcaaagtcctgcacatccataacttttctgactagaccttcttcaagtaagtcagtggtaggtttagtaataccacccaaagcaaatgatgcagtaatgccatcatcaatcatactttgacgtaagtacctggtgacagctaatgcagcaccaccagaaccagtttggaagctaaacccttgcttgtaatatggagagttaatgattacctggttaaccatttgagcaatcttgagttccttaggatccttggtaaagcgagtggcaccagaaccaatcttgtctggatctccgactttatcaattttaaccacataatccacttgatcttgctgaattgacgcaggcgtatttggataatcaacaatattatcagttaataaaacaaccttattagcatagcgagcatccattagggcatagcccaatgagccgaagacagcatccccatcttgaccgttagcattacctgcgggatcagatactggcacacccaagaaggcaacatcaaccttaatctcgccttcttcaattgaacgagcacgattaccatgtgagcggaaaattacaggattcttcaagccgccatgtgaaacaaaatcacctagtgaaccgcgcatacccgaagaagtaatattagtgattactccctttttaatcgcttcgataactttatcattcataacaccagtaagtgaacttggagccaaggttaaatcctggtaacccatactaataatcttgtccattaccaagttaaaaacataatccccatttctaaaatggtggtggaatgaaatagtcataccatctttcaggttattcttgattacctcatcaagtgaatcaataatcttattttgtccagtagtaactcttacctttggagcaacccgcttaacttcaggatgaccaatttcagtagtttcaaatggtttcaaattcatttttttcattaaatcatctggtaattcgcgttttactttattctccaatgtagttaccttctttatcaatcaagttagaagctttcgctgtttccaaaaccctggtagccttttctacaactggcttatcgatcatcttaccattaagtgaaataacgcctgagcccttagctttggcttcacgaatggaattttcaacattcttagcttgctcaatctcttctttagttggattaaagaccttattaaccatttgaatttgacgtgggttaaccaaactcttgccatcataccctagttcatggatatagttagtttcacgatagaagccttcagtatccttcatatttgagaacaccgtatcaaaggcatatacgtctgcggcccgagctgcttgtaaaaccatgttacgcgcaaattccaattcgcgaccatctggataacgatgagtatgcatatctgcagtatagtcttcgccagataccgccaagcccatcattaaaggcgttgcggttgcaatttctggggcatttaagacacccttggctgattcgatggcagccatcacgccaatagaaccattttcaatgtcaaattcatcttcccaatgttcgatatcctttaccaatttttgaatcattgcagctgattcagttttaggcaagcgaataacgtcaacgccggcttttaccattgccttaacatcttcatcgtaaaatggcgtggcttgaccattaacacgaactacaatttcactgccaccgaaatcgactgtcttaattgcctcataaaccaacattctggcagcatctttttccgttaatgaaactgagtcttccaaatcaagcataatcgaatctgcaccataaatgccagcatccttaatcatagctggattattaccaggtacaaacatcatggttctacgcaaacgattcttaacgtatggcatttagagcacctccaaatctggcttgtctgaagtttcggttgcacgttgtgcagctgctaaagtacgagccttaattacacaatccagtgctcccttatcggttgctttaaccttggcattttctaagccataagcttttaaggtgtcagtaatcaccttttcaatctgatctccataggccttttttacttctgattcaaggtcaatctcaatgccgttagaaccctttgaaatcatgatttggatatctgaactctcaagtgttcccgcaactgctgtggttttaatttccatcaatattcattcctttctcaattttagactgcaatttctgcatgttttgcttaataaattcataagtcgtttccggcacgaatttattgatctcttttaaattgccatccttgatcagctgtctaactttagtggcagtaataatttgaccgtctttttccaagcgatcaattacgattacttcaatctcaggaccaagctcatgcgctaggctaacattataaaagtgagtcgttcttgaaattggttctttaccaatataacgacgggtaatgttcagtcctggtgcaatttgattcttaaagacagctgcgtctatcaccgtttgtacagcaattaaatcgtcaggtgattttaagaagtatgctggaaaagtagctggtgaaaccatgtagtctccgccagagattactttcacattactaaactccttagtaccttcttgcaccaatttgaagcgctcatcaaagctaaacaaagaaacatcattagccacaacaaagacataaaccaaatcgttttcttcactagccatcttaatcaaatgctgatgacccaaggtaaacggatttgcattcatgactattgcagcgaccttcttatgctcttgatctgctatttcgggcacttcagccacaaattccttcacatcaggcgttccattttctaaaaaggctgcctgatccgtcttggctaacaaattgaagtgcaagtgctcaaagctagttgcatactttgctttagtaaagacaaaggaatggaaaattccatcattagtcaaatattgcgttaaggctgtaaccactttattaaagcgagccccctgcgtatcggcatcattcttgactccgatatactttaagacattaccagccacactaccagtaccaactaaattgccttcctcatcttctagcccaatagtatgatcaatcacgttaacttcgcgttcactaaaatcatttaaccccaatgattccaacaagttttcccatttttgcctagttgtagcgtcgtttaaaaacaaatcaacgactttatccataaatatgccgccttactatttcggtaatcgttttcacaaatatagtttactctcttagtttgattatttcaatttatctattaattttttaaatttttcaaaaatttagcaataatctcatgcgttttttctggttgctcagcctgaggcaaatgcccacattccggtacaatcgccgtttgaacatcttgattcagcatttttatcgcttgagtaaattctggattaaaaaatggcgatttttccccagcaattaccagcatgggaaccggcgtatccaaaatcatgtcacgccaatcttgctccgcatgttcaactaaacagttatagttttcggctggatcatatgggaattcttgatattcttttttagcagccaaaaacattttttcatcaatgtgatggtaacaagccttgccaaaatcaaatttaagcatgtcaggataattatcccaagttaggtctttaaagccatacttccagctcttatccgcaatcatctttggtgactggtctaaatcaaccattgcctttagtctacctttgccataaattgacaaatatgcccaaatattggcagcccccatggaatttccaatagctactacatcatgcaaattgagcttaactaatagctcctctaagtcaactgcatgacgactaatccgctgtccacgataggttcgttcggactgtccttgattgcgtggatcaagcataataaaacgataatcatttttaaataaggcaattaaatcttgccacatttgacaagatccccctatacctgggatcccaatcaaagcaggcttatcttcatcccccgtatcggtataatgcaaaattacatcgtcattagttttaaatttcatctttaatcttctttcattttgattactcaattctattatgacgcaaaaaaagcaacctggtgattccagattgcttattttttaccataaaccaataatcttcatccaaataactccgacagttccaaaaataatcatatagattaatccaaggacaaaattcatcttccaccattcaccttgtttaacatagccagtagtagccaaaattgaggcaggaccattagcatagtgagtggttgatgcgttgattgcaccagtaaaggctaaaagcattgcggaaaggcctaaaggagcaccagttgcaaccgcaacagacaagaatggcaaataaagagcagtcatatgtgcagttccacttgcaaagaagtagtgggtgtagaacaaaagcaaaactagaattgccaatacaaagccccagctaacaccatgaagaccattttgaactaatttggagaaccaatcaataaatccgtatgaaatcagcttaccagccatgaacatcaggatagaaagccaaatcaagatattccaagcaccagtttctttcagagcatcctgcattgttaacacaccggtaatcatcaaaatagttacagccaggaaggcaacaaaagtcgcatctaattgtgggatcttaaagaaaccagacaaaacccataaaacaattgaaagaatgaagactgacatcataattttttctggagttgacattggtcccatttttgctaatttttcatcagcccatttcttagcatctggagtttctttaatctcaggtgggtacatcttgtaaataacaaatggaatgattactgccaatacagcaacaggtacgattgcagtgaaaaaccaacctgcccaagacatttgatagcccttttgtgcggctaattgttgagccaccatgttaggagcagcaccggtaataaacaaagccgttgataaaatattggcatgaaaggcagtaaagtcaatgtaggcaccaatctttttacgagaagcatcatctggcttagaatcgtagccttcttttgaaacagattcaacaactggccaaacgaccccacccgtacgagctgagttcgatggaattaaggcaccgagaattaattccaatccagtaatcgcataaccaatacccaatgacttcttaccaaatttttgaatcataatataggcaatacggttacctagacctgttttactaataccatgagccataatgaaggccatagcgattaaccatgcagcagagttaccaaatgaactaagcacgccttgattaactaccataccttttgcatttgtaacgtccttcattggtgctaagccaactaaaacagttactaccaagccagctaaggttgtaccaccaattggcaaaggtttgtaatacaccctacaattgtggcaacgaaaacggcaaacatttgccatgcctgaaccgaaaggccacttgggcgccatggagtaatacaccacaatacaattccaacgatcaaaggccaaataaagcctttataattcactttttctaaagttttcataagaatcccctattctctatggacgatacacatcatcaatgatgtcaaagcctttatctgctaagcttttatctacccaacttaaatcaacttctcctttgctaaaggcaattgctttagcctcatcctgctcatgaaaagcttgtgccttaggcaaaatctcaggagcatctttacgtggaatacaaattactccatcagcatcccctaaaatcacatcacctgggttaacactaacattcccacaagcaacaggtacatttatttcaccaggtccttctttatatggtccacctggggtagtactggttgcataaatcggcagtttccaatttcttaaattatcaatatcacgaattgggccaccaattacaatacctgcaattttcttttgatcgcgtaagtaagacatcattacctcaccaatcaaagatctagtgttatcaccctcgtcgtcgatgacaatcacatcgcctggctggcaatactttaaagccgcataaattgctaagttgtcacccgccctggtgtgaaccgtaaatgcgggaccaaccatttcctcatcaggattcgacattaacttaattctaggattcatagcacaatttcgttccatgcaatccgcggtattagaagctgggatctttttaaaaccagctacaacttttggatcaggcatttgcctctttaaataaattctttttcctacaggcatagagtagctctcccctctttatgctccctaatctatcttgttattgttaaacaagcctttttataaaaactaaaactcatcacaactcacaattagtattatacacttatcaatagattaagcggttacaaattttgaattattttgattttttgcttattttttgaattatttaaactcaaataattatgcaaaaaaagagaactggctaattaaaccagatctctttacttgatctttgttattttgatcttattcaccaaagttttcccaaggcattacatcgattgcaggttgatcaagcaactcttgcaattcttttggtaaaaattctttcttcacaatcacatcataaacatattgttcaaaccaagcttgactcatttcgtagaagcccttgtgaccaaacttgtcgccccatgagttttcaaccttccacttacggatatgaccgttgtcttcatcaacaccgactaaagtcatatcgtgagtagcaaagccctcaccagtattcaaacgatcagccttgctcatttgcgtatcaacgtcaaataattggtcagtcttgtacaattcagtatccaaaaagccagtttttctttccatttgctttaaaacgtcattaccaaagctgactgcttcacctgccttaagttgcgccactgcagcttgagctaaatattcaattggcacattcaagtatttgacttgatcgccgccagccacattgtcataaagtggcaagtggtaaaccttgttatattcatggttaggaatgttggacaaagcaacataatcatcgaagttgaagtccttaaagtatttttgaacaaatgcttgtggagtcaaatcacgctccaaatggtacttcttatcatcatcacggtattccaaatcaaatttctttggtggttcacccaaggcaactgataccatgcgataaatttcgttcaagaattccttcttggtcttttctgcttcatccctcttgccttcattaactaatttacgcaaaacaagagcgtcttttctctccttacgagctaagttttcggctaaagcagtagtattattagtattaaagctttctggcattgcatatgaaggtaccacgccatactttttaactaaattaatggccatggtccaaaggccaccatcttcaccggcaaactcaagccatgcttgaacatgacgatcagttaaaggtttatctgccaaacgaataattgcattgtaaaaagcgttagcacgttcaatcttgtcccagaagaaattataagcttgtgagaacgtaaaatccttgaccttgttttccttgccaaagtagtggcgcaaaacattcaaagtagtgaattcccagcaacgaccagaatgcttctgatcagttacaccgccaatatcaagttcagttgaaaagacatggttaagtcgttctgatacgcggtcattaaatgaagcttcaagcaaaccactacgacgagcagcacgagaagctactttattctcaggattagaattaaagctttcagaaaagccttcaatttcttgttgtgaaataactgtcatgatatacctcgttaattcttatcttttaattttttattaatcttttcttatataatactattttctagcttttttgtcattaagaaaaagtcctagtttttgacaactagggcttttaataaaattaatgatcaattaaaggtttatacctgacaaaacttcttgcatcttgtctgctgagttaatcatcttagcatgctcagtatcggaaagcttagtttcaattaccttttcgatcccttcaccgttaataacggttggggtacctaagtaaagatcatgcttaataccgtattcaccattaatcggagctgaaagtggcaaacaaattgcacgattgtccaaaatagctgagacaatttgagtaagcatcattgcaacaccgtagaatgtagcacctttgttggcaatgatcttgccacctttcttacgcacatcggtctcaatttctgctagaacatcatcgttgatttctgagtaatcacggagtgccttaccagcaactgttgattcatcaaagttttcaaaactagtatcaccgtgttcaccaagaaccattgagttaaccttagcaactgggacattcaaacgctttgaaagttcaacacgaagacgcattgaatcaagtgaagtaccagtaccaattacacggttcttagggaaaccagacaacttttgggtcaaagtcgtcaaaatgtcaactgggtttgcggaaacaacaaagacaccattaaatcctgattcaactactggcttaacaatactttccaaaatcttaacgttcttgttaaccaagtcaagtctagtttcacctggcttacgaggaacaccagcagtgatcacacaaacgtcagcatctttagcatcactataatcggctgcaggatgaatattggtttgacccataaatggcgtaatatcttcaaggtccattgaatcaccaacaggacgatccttagctacatcaaaaattgctaattcatcaacaattgtattttgcaataagtcatttgcaaaagttgaaccaacagcaccatcaccaacaagaaatacttttctactcataagttaaattagtcctttcaaatgtttataaactgttttttatctacatgattaattatacactaagcgctttcattagacacgatttattccataattataaattataatatcccatcaaaatctcgccagtgttattatttctatcgaaaaagagcagttaaccaaccgctctctttacataatctttcttatattatttactttcacgaacatatttagccatctgaatacctgcttgacgaccaaaaataactgtttcggcaattgagttaccaccaattcgattatttccatgaagtccgccagatacttcaccagctgcaaataatccatcaattacattaccattagtatcaagtacttgagtttcagtattaatatgaataccacccatagtatagtgaattgctggatgaacatgaattgcaaagtatggaccacgatccagttcacgatccatcccagtcgttctgccaaattctttatccttaccagttgcaacggacttattccaagcggcaatggtcttttctaagttggcaccatttacgccaatttttttagctaaatcagccaaatcagtaccatgttctactaaaccaatctggtcataaaactcaactgcagcaaaatgagcccgtacacctgagtcaaaaatcaagtatgccccatcttcatgcaaattagtaattgcactagaaacaatctttcgtgtacttaattcattaacaaaacgttgaccattcttgttaactaagatagcaccttcaccgcgcagaccttcaccaattaaataaacatgcggattatcagtatctgcagttgggtgaacctgaatgaagttcatttgcattagttgagcatcaagtgcttcagcaagcttcagtccatcacctgtagcccctggctgattagtagtcttatagtcaactaagtctggacgatacttcttaatgatatccttggaagcaccaaagccaccagtagctaaaagaaccaccttagctttaactgttttaatgccatctggtgtctcaacttcaacaccattaacgcgcttcttagcatcttgcaacaacttggtaactttagcaccagtaaagatgtcaatacccgcttttttcacctgtgttgtcattcgtgaagttagataaaatccaactggttccattgaagcaggacggtgagcacgtttcttactcatccctcctgtaatggtcaaatcagttaaacgaataccatatttcatcaaccatgaaatagctaaagcagagtggttaacaaagtacttcaacatggcacggtcatttaataaacctccaccttttaaagtttcttcatagaagtcacggttattatcaatgatcccttcgtcaagctgaacccaagattcagaagcgttcattccacttgaagcacgactagtgttaccaccagttttctcatttttttcaagcacaacaacatttagacctagttcatgagcttgaagtgcagcagtcagacctgctccgcctgagccaacaacgatagcatcatatttattctttaattcttttgtatttggcatttcttactttccctattcttctggagtagacttatcaacattagtcatttgcatatagtccatccattcatcatattgttcttcagtaactttaccactcttcaaagcagcttctcttaaagtagtgccttctttatcagcagtttgcgcaatcttagcagcagcatgataaccaatatgtggcgacaaggcagtaacggtcattaatgaattctcaagtaattcatccattctttcttcattaaccgttaagccatgaatcattttatcagcaaaaccagtaattgtaccagttaaaatatcacaactatctaagaatgatgcaatgatgactgtcttgaagacgttcatttcaaaattaccttgactagaagcaaaggtaatggtggtgtcattaccaaatactttagcagcagccattgtcacagcctctgcctgagttgggttaactttacctggcataatacttgaacctggctcatttgctggaatatttaattcatggtagcccgctctcggacctgaagcaagtaaacgaatatcttgcgcaatcttaaacatatcagcagccaatgttttaagggcaccatgaactacatcaagacctgaatggtgagctaagccccagaatttattagttttaacttcaaatttatgaccatagacttctgataatttaccagcaattttttcggtcattcccggtgctgcattcaagcccgtccctacagcagtcccaccaatagctaattcgtagagagttggcttcaattcacgaatatatgataagtcatgtttaagagcagaaatatagccagataattcttgaccaaaagtcaaaggcgttgcgtcttgtaagtgggttcgaccaactttaacagtcttccaatatttcttttctttaacaactaattcatcaattaagtgttgaattgctggttccaacttgtccaatgcttcaacggcaacaatattcattgcagttggataagtatcattagatgattgaccacggttaacatcatcattaggcaaaatatctaaacctgggtgcaatttattagccaagttagctacaacttcgttaacgttcatgttgctttgagtacctgaaccggtttgcaaaacatgaagtgggaagtccttacgcaagtcagtatcgcttaaagctagcaaatgatcaattgcatcttcaattgcttcgcctttttcttttggttcatcgccaacttcaacgttactttctgcagctgccttctttaagtgtaaaaatgctcgaataatttgcaatggcatcaattcaccacttgggaagttattgcggcttctttcagtttgagggccccataaagcatttttagggatcttaactggaccaatagtgtcactttcaacacggtattcttcttcgctcatattatattcctccttattaagctctataaggtttgcgttaattatcaatcaccatttataatacctgtaaaggctttctttttcaatttcattccaaaaaaagacccaggatttttcctggatcatagttttatctagactggtgattcattcttttagcaaagaagtcaccaatgatttgaacgataaaaatcaaaataattactaatacagtagctactaaagtaacatcattattgaatcggttataaccgtatgaaatagcggtattacctaaaccaccggcacctacagcaccagccattgcagtcaaaccaatcaaagaaataatcgtcaccgtcgaaacacgaatcagttctgagcgagattctcttaaataaacatcaaagataatatcacgcgcagttgagcccaaactttctgcggcttcaaccttacctgggtcaacactttctaaagcaacttgcacctgacgagcataaaatggaaatacgcctaaagttaatggtactaaggctgccttcattccgatctgtgtacctacaattttttgagtaactggtgcaacaaaggcaagcaggataatgaacggaatcgctctgaagattgaaactagcttatctgagaaattgtaccagaatttattgggccgaatcccgccatccttagttaaaactaaaatcacgccaaagataataccaagaatgccaccaaagatagctgaccaaaaagtcataaataaggtctgaaaaatactagtgccccagccagcgtctccgccccagccaagttgaacaacattgggtaaatatttacttaagaaactaatcatgatatacattccccttttcatctaaacgtgtaaatgtcacattttgcttagccaaaaattcttgtgtttgcttttgcttagctggatcgcctttcaccaataccaccaaagtaccaattggctcttcattcaaaagttcaacattcccataaagcattgaaacttctacgccaatttgcttatacaattcaataatgattgatttagtcacattagctacgctgtaaactaattgataaattgcttcatttttgccaagcttatcaagcgccaatgaattcaaagtagaaatcgcttcaagtgatccaccaacaaacttcttggttaaatcctgcttaggatgtaagaagacatctcgcaaactgccgtcttcaatcacattgccgtgttccatgacggcgaccttagtggcaatcttcttaacggcatccatttcgtgcgtgattaagatgaccgttaagtggaactttttgttcaaacgcttaagcaggtccaagatttgttgcgtattttgtgggtccaaggcactggttgcttcatcagagatcaaaatatctggattattagccaaagctctagcaatcgctactctttgttgttgcccaccagataattcagctggataaaagtcagccttatcttttaagtcaaccagatcaagcagttccaatgaccgtttttctaattcctcatcactcaacttttcatgttttaaggcaaaggctacattttctaatacagtcgtttcatttaataggttaaaaccctggaagatcattccgatgtttctgcgctttaattgcaattctttattagaaatcacctgcttgccatctttaacaaattcagtgccatcaacggtaatactaccggcagttggtttttgtaaaagattgaccgttctaactaaagttgacttaccggcaccagagaaacctacaattccataaatgtcgcctttttcaatggaaagagaaacattattcactgctttaactggttcgcccttcttctgagggaaggccacttctacattttttaattcaacaatactcatttttgatcctccttacttcaacttaacgtcccaggctgcaatttgcgtattgccatagtattccttagttagcttcttagtttctgcagtttggtaagccttgacgacatcttggtaaagcttgtccttttgttttccttgtttgacacaaagaatgttaatccattgttttgaatctttgttaattggttcaatgtaaatcgtttgcttatcagtcaagccagcaggaccagcataatcattatttactacagaagcgtcaactgaattcaatactcgactagtttgttcagcaccgatttccttaatcttgtagttatttggattgctggtgatatcagctacagtaactaaggtcttacccttcttcaacttaattaagccagcatttttcaaaacaaacagtgctcttgattcgttagtagcatcgttaggcactgcaatcgtggcaccatcaggtaagtcactcaatttatgatacttgcgtgaataaagtctgatcggtgcgatgtaggttctaccaatggcgacaacgccaccgtgatttgccttattccaatcctttaagaaggcatagtgttgaaaagcattcatgtcaatatcgcccgacttcaaggccttgttaggttggttgtaatccgtaaagttcttagtttttaaggtaataccatatttttccttagccgttttagcaattgacttccaaattgcggcttcggctttactttccccaacgattccgactgtaacagtttttgcctgattttgactgggaattcctggaccaaaactaaaccaacctgcaatcacgatcagtatcccaatgatcgtccaaataatggtatttcttcttctccgttttctcataaaatacactcctactttgataaaaataaaaaagcacccatcccaaaaggacgagtgctcgcgttaccacctttaattcgctgatcacttacgtaatcaacctcactggctatcaaaaaatagcctgcactgttaacggatgcagccccgccgatagctaaatatcgccaccggtcatcgttccaaacccatattcactagctcctatttgccaactttcaccaccacgctggctctctttatcaatagaagttctagttactcagtccttcaagatgttgttttcttgatttgttataaataagttatcatcttcttttaatctagtcaacatcttttttaatttttattagataaaagcgatttcattgtataattaggatatagttaaataatttatttttgctaaggagaaaaaatgaagaaaaatcgctttcgaagttttgctctctcattagctgcagcaattggattcatttcttttgctaatactaatgtcccatgcaacaatcaaaccgtctatgctgtttcagataaagcattggtcaatttgaaataccacaacaaagaaattgtgaccgttgatcatgatcagccgcagttttctaagagtacattgagcaagaaaaaaggtccatggcaaaaatatagccaattagattatttgaaccgagctcatgctgctaatgctttactaaataaaagattaatgccacatagtcagcgtgcggctttaacttggaatccgaccggctggcataataaacgaatcgctagtggttggttgtataatcggtgccatctaatcggctatcagttgactggtcaaaacaacaatccacgcaatttgattaccggtacgcgtgaattaaatgatccggatatgcttaaatatgaaaatgaggttgctgaatatttacgtagttcgagcaaaaactatgtccgctatcgggttactccaatatttaaagggaatgacctattagctaacggcgttgaaatggaagccgaagcaactagcaaaaacgggcctcgctttaatgtctacatttttaatgagcaacctggtatgttgcttaattacaagaccggtacttctaaggttaaacatgggtctagtactattgctgaacatgtaaaatctagaaaacgatccacttctcgagtaaccaagaaacgaaccattcaccatatcaaaggtactgtatccactgcagaacaccgagtcgttggcaatcgtcgcagtaagatctaccatgtaatgaatgggcaaaattatcatatgtcatcagctaatgcagtttacttcaacagtgaagctgccgcacaagctgctggatatcgaaaatcattaaggtagtaaaaaagtcagagcaaaactctggctttttcattatcttcttatttcacattatttttgccacgatcatatgcttccttgaattccgcaaaagtcatgttctttcctttttgatcaaagacaaccaacacttcggcgattccatccaaaattttagataaccatctaaagatagtcactgccgcacagaataagaccgccaaaataaataatgatttgttattaagcattgtcaatgagaacaatcttgggaaaaagatagttgagccaataatacagataactgataagcccataacagcaagtctaaatttgtttattggtgccgaaatatgatacatcaccataaaaccaactaagactagcaacatagtcgctgtcgtgcctacctgaccatgatcaagtgagatagaggcccctgcaatgactaaaattgcaactgccagccaatctgttaagccccctggaattgcccgagctaaaacatttggcataaactttccacgaattcgcttgtggttgctttctaaggccaataaaaacgacggcaagccaattgtaaatgcagagatcaatgtgatctgggctggctgcagcggataattgattgtcataatcaaagagaagatggccatcaagaatgaaaaaatatttttcaccaagaacaagctggctgaacgttgaatgttattaactacttgcctgccttggttcaccactaacggcattttagcaaaattagaatcgagcaaaaccacttgtgaagcttgcactgcagcactattaccagaagccatagcgattgagcaatccgcctttttcatcgctaaaatatcgttaactccgtctccagtcatggctacggtattaccttgattttgcaaagcaacgacaaactttcgcttttgatcaggcttaacccggccaaagacattatagttttgcatggcctgctcatattcaccatctttaatggtttgcgcatcgatatacttatctgccccattaattccagcttgcttagctactcgagcaacggttaccggattatccccagaaataaccttgatatcaacaccttgctggttaaaatattgaaaagttgacttggcttctttacgaattggattcgacaataaaatataaccgagaacttgtacattttcctttaaggcggaattatcttcagttaatatgccaggataattagccgcaatcaacacccggtagccttctgccgcatatttttcaaattcagtttgatattgcgcaaattgatcacgcaaaaccatttcaggcgcaccaattaaagttgtctgattgccaaaaattacaccagaatatttattaactgaggtaaaaggcaaaatgctatccgccgttttggttccatctttaaaataggcttgaatcgccttcatcgtcgcgttatcagctggcatgtttttagcaaaatccgcaatgatgctacttaaatcaccagtaaaattcttgctactaacagctttttctacggccatcttcggttcggtaattgttcccgttttatctacacaaaggacatttactcgggctaaagtttcaacactcttcatatcgtgcagcattacttcttgtcgcgctaatcgcatagcagctagagctaaggcaatcgtagtcaataaatatagcccttctggaatcatcccaattaaagcagcttccatggaagtgatactacgcttgagtccaatattattcaaaaagaaactctgactaaatagggcaattcccaccggaataatgatgatgccgacccatttaaccagacgattgattgaacgcaccatttcagattgttcaacactgcccattgcctttgctttgatcgttaatttagaaatatatgagtctttacccactttttctaagacggcataagccttaccggaaactacaaaagaacctgacattaattctgcgtctttagtcttagtgatttcatcagattcacctgtcaacaaggcttcattaacccgcagctcacctgagattacccgcgcatcagctggaatctggtcaccagtttgtaaaagaatgacatcatcttgaaccaatttttcgatgggaattttttcttcttgcccatcacgcaccgcgataatttccgtcgcattcatcacgtttaacttgcttaaaacttttttagcacgaagctcctgcacaataccgataatcgtgtttaaaacaatcactggtaaaaaagtcagatcgttccaggcaccaacaaacaccaatagcacagccaaaatagcaaaaatcaagttaaaataagtaaagacattttctcgaattatttgagtagctgttttggactggtcatcaatggcttgattaacctgtccattttgaattctttgatcaacttcagcttgagttaatcccgttatttgtttatctgtcataattttctgtcctatactgaaaatactttcatccattatagcgaaaaataaaaaagccacgcaactctgcgagactttttaacaattatttattttttctacgataagttaaaaaagtatagtcatacttgttcttttcatcatgatgatgctcttcgcgactaactaattcaaaatcatcatagttaatcgctggcatcactgtatcagttttaaaattagctttgatctctgttttttctaaaagatcaacttgatcaagtaacgccctaaagattgaaactccaccaattgcacagatttcttcagtctgatgttgacgaagatattcatttaattcagctaatgtggacacaatcttcacttgctcattacccgcatatttttgctttaattcttgacgatgagttaaaacaatatgttttctctctggtaacaagtgaggcaaactcgcaaaggtttttcgccccatgatgatcggatgacctatggtcttttccttaaaatgcttcaagtcagccggcagatgccaaggcaaatggccatcgatgccaataccatgctgctgatcttcagcccaaacaaaacttaacattgagacctcctaaactgcaaccggtgccttgatcgtgccatggtgctgataattcagcactttgatatctttcatttcaaagtcttcaatgtgctttttttcaggattaagccacaattcaggtgaatcatatggcgtccgactcagcaattcctttacttggctaaagtggttgcgataaatatgtgcatcccctaaagtatgtacaaattcacccacttttaagccggtttcacgcgcaatcatgttcaagagcagcgaatatgaagcaatattaaatggcacgcctaaaaacatatcaccacttctttgataaagctgcacgctaattttgccatcgactacataaaattgaaacatcacatggcatggtggcaaagcactagttggtatgtcttctggattccaagctgtcacaatcatgcgacgtgaatctggtgtttctttaatttgcttaattacattagcgatttgatctataaagccaccacttcttttttcccagtgacgccactgtgctccataaacatcacccaaattgccatatttttgtgcaaatgcagggtcatctaatattcgttgatcaaattttttcatttctgcttgataaacttgattaaattctggatcactttgactacgcaagccaaaatctgtcatatcagccccctgatattcagcactttcaatccaatttttaaaggcccattcatcccaaatatgattgttatgctctaacaaaaagcgaatattagtatcgccccgtaagaaccacaataattcacttttaattaaaccaaacggcactttcttagtcgttaaaagtggaaagccctgtgtcaaatcaaaacgcatttgggcaccaaaatatgatctagttccagtaccagttcgatcatccttgtcatgtccttcagtcataattttttctaacaaatccaaatatggttgttcaagaattgccattatcttcacctttcaaaaaacatttcttctaacataccatagatcttgtatgttggataatgaaaaaccatagatttagtatttcatacaaaaaataaaaaggtgaataatcaccttaattatttttcttaaattcacttttatgtctgactaagtagacaattgttgccacaatcaagactagtgccccagcgataactgaaattcttgtatcaggattgataaacataaaaatcacaatcagtattaacattgcaaaggcaaaataattcgagaatggatacaaaggcaacttgaatggatgatcttgcattgcacctttgttatgtcgtctaaatcttaattcagccagcaaaatcacaaaccacgggatcatccctggtaaaacagaggaactaaagacaatcacgaataagtcactggctgaatgattgaattgcgaagcaattacattcaaaacaaaaccaataaaaataccaccagaaatgcccataatggcccgatcgggtacaattcgcttagaaatatgcttaaaaataccaggagcttcatgatcatgtgacagtttaaacagcattctacttgaagaataaattcctgaattagctccagaaagagccgctgttaaaacaacgaagttaattattgaagcagccgcagtaatccctactttagcgaaagtcgttacaaatggtgaacctaggctgtctaatttatcccaaggataaatcgttacaatgacaaaaattgctccgacatagaaaattagaattctaaacaaaactgacttaacacttttaacgattgcctcttgtggattggctacttctccagcagaaatacctaataactcgattccttcatatgaaccaacaatgattgacattgaaaagaaaaatccttttattccaccagtaaagaaaccaccgtgagaccataaattgctaaagccagttggatgtcccccattaccaacgccaaagaaaataacaataaagcctaaaataatcattagaataattgttactactttgatcatggcaaaccaaaattctaatgaagcataggctttagcactagctaagttggccaaaagcagaaaggcaataatgatgatccccgaccacaatgctgaaatatttggccaccagtacttcaaatattcagttgccgcgactacttcggacattcctactacaatatattcaaagacattggcccacatcgctaaatagccggctaagggatgcacatattctgttgcataatcagcaaatgaacctgtaccaggattgatatagagcatctctcctagtgctcgcatcacaatgtataaaattaagccaacaaacatgtaggctaataatactgacggaccggtccacttaatagtagatgtagaccccataaacaaaccaacaccaatagcaccgccaagtgaaatcatctccatttggcctgctgtcatcgtccgtttgagctgaggagctttagattttttattcaattttcacaactccaataattaatctatcctaattaataacccgcaattaatttactggttaaatcaccattttgtcaaggttcaaattaaaaatattaatatttgggagtcttttctctaattgatcttttattcctttattaaatgaatttcacgatcaaacatttgctgcatctttttattaaaattatgggcaataaagacaattgttgccttgctttttaatagcttttgcaaaatattcatagtcgcagtctgatcaattgcactagttccttcatcaatcaaaataatgtcactgtcatgaatcttagctcttgctaagacgattttttgacgttgtcctccggaatatccaagtcaattttttcatcgacacctgctttaaactttttaatatcggccgcaaaattaacttcatcaagcacttgagctacttgattattaagttgcttgttgaacattgtaatgttttctttaattgtacccggaaataggttcggctcttgtggaatatagcctattcttgacatattaggcttaattgtcaaaccttgactattttgaaattcaattttgcctgtgctaggtttaagttcacccaaaatcaatttaaataaagtagacttacctgcgcctgaatctcctgttaataagattttctcgccaggtttaactgcaatatcaggaaaagtaagcttttcaccattaggatactgcaaagccaaatcttttgttgaaaatgctactggtgtctcttcttggccagctttaactttttcaatcacagtagcatcaccatcaacttgtttcattaaatcctgtgacgatttcataaaacttaatgcctgaattgtttgttgtaagccgatcgaaatattagctgcaaagttttggacagacataattgcaccaaaaatcactaaattcttagtgatcaaaaaagccgtcaaagacaacaggattatttgtcctaccatgttacagatcccattcaaaataattaattgctgttgagcagccgtttgtttaacatgagcctgttctactttacttgaagttttttcacctacctgaaataacttagcaccagcaaaatatcttcttaattcttctaagccagagaaccatttagctaaaacatctagataatgcttattttgctcagaaacattattagttgcttgttccattttcttttgtactaatttaggtacaaagtaagaaacaatatcaatcactacactagtcaaaaagattgaccaattaattgtaagtagagccaccaatgccgcaacaaacattgagccatagaacggcacaattggataccaatcaaaataattttttctaatcatttctaaatcattagtcatccgattttgcacggccggtacttgatgattttgaccatctctaaagtaatgtgtagccaaacgagcgcgcacctttttattatattcttcttcctgcactcgaattacaaattggatataatagatcatcccttgagcagctaaatataaaatccccattaaagccgtcgcaagtaaaatcttcacccaagcacgatctttgatataagtcagccagtacatttgaatgtagcctgcaccaatagcagcgacacctgaaataactgataaaatattaatgtaaataaatcttaaataattagttttaataaagcctttgaaactcaatcagcgtcacctcgattagtcaatttaatttgtcgatcaaacattgaaactaattctgtagaataattgtgcgcaatcataattacagtacttggagtattcaataaattttgtaatacttgcttcgtcccagcactgtcaattgcactagtcccttcatcgatcaatagccaaggtgattgatgaatcaaagctctggataacacaagcttctgcctttgtcctccagataaatttcctttatccaaatcaatttgactattaagtccagcagacatcttattcaaatccttggtaaaacctacttgatctaatacacctgaaatttgattatttaaagcactattaaacatcgtgacattattggcaattgtgtcaggaaacaaggtattatcttgagcaatatagcctaattcatcaagatcaaaatttaatttttgaccattatgatcaaaaaaattgatctcaccttggctgggcgttaatttacctaaaattaatttaaataaagttgacttgccagttccactatcaccagtaagcaagattttttcaccttgcttaactgtaaaatctgggtaagataaatactcaccatttttgaattgtaaggccagatcttttacttctagccagttaatcttcttaacttgatgctgatctggagctatttttactggagcttgaagattagtaatttccttattcaaatccttggtagatttaattaaattccattccgttacaaatgctgaaacaccattcattacagttgaactaaattgaatagtagtaattaccccaccaaaaacaatttgtccttgcaaatataagtaagcacataaaaccatcaagagcatttgtcccacaatattaactacaaaggtgatcatatctgcaatagcaatagttgctccttgatgaatagctgcttttttatattcgtctgcgctttggttaactgattcactaaatatattaaaactggcatatcttcgtaattcatccaggccactcatccactgggctaaagtgtttaagaacttttcatttttcttagtaacctttattgtggccgatgaagtcattttttcaaaagttttaggcaaaaataatgaaattgcagttaaaatcaccgtcattactactaaaagccagttaaatgaaaacaaaattccaattgagaaaagcacagacaacaagtacataaaaccgtttttgattggttttaaataattctgtgttagctgatcaagattggcaaccaattcattttgcactttagcagtttgggcaatttcatttttaaaaaagtagcgactaatttttacacgaatttgatgcaaataagattgtgattgctttccgtataagtaatctgaactagtaatcaaggctaatctaactagatcacagccaatagccaaacaaataaaaataataaagccaaataaattcattttctttagctggttaaaggccggggtcatcaaatattgcgaagcagcatcaacggtcgtaccaatgataaccattagaaaaattaaaatgaatttagctttattgaccttaaaaatccctttaatactcatttgtctcatctccaagcaaattaaaatattaaaaatatcttatttatgtttaatattaccgctatttttttaatattcaatcactttttactaagtggttaaaaaaataacttgaacggcaaaattattactatatctagctaattcattaggaaaaattgggaaaaaaatagactagaaactcattatcaagcttctagcccattagtttaattcaattattaacggtaattcttcaagaaatccatcatcttttgataagctgcatcatgatctgcatcatatgcatcgactacatcgactactttattatccttagtaataatacggtactcacgtaagtctttcttttcattagcaacaactgtaatctcacccttacctggggtagagaacaattctggattaagttcttcgttcaacttatctgataattgttggttaaatgcgattgtattcatttttgtttttatctcttttctaaaaaatccaacacagacattatatcattattagataacgttgatgaatttagttttattttttatcaaggagaactgtacctgcagaaggattatgatcaattgcaccaatgatggagcagtaacaccttcaatatagcacagcaatacttattccaaaaatatcaatttgttattttgccttattacttttacgtatagatttcacttaattaaatgcacaacaagcatggcaattcctaagaagacaaaaattaaggcaacaatcatactagttactgtgccggtaactaaacctaaaatgatcatgccaataattgaataaatattcatttgttatcccttcaattaaacaataacagcagtatttacttttattatgtagcatgaacactttaaaatacaattttaacgtattttaatttgctaactttcgatataacggcaatagctgcccaataccatctaagatgaagttttccatatctgcaacttgatcttgctttctaaaagcaaattttcctaataggaaactggattgagttgcttccttattaaatgaagtctgtttttcagcatctgttaaatactcatttaaggataaatgatcagcaaactccatttcgtttttatcccataagtaccaattattagttgtccgcccttttgcccaatcaggaagatcagttaataatttattgtattgttcaggattatcgccgcgcttttcactcttataatgctgaaacataagataaacctgcagctgcttattatccagcatcacgccgatgcatggacttttatcggctaaagcattcaaacgataagctgcccagtaatgatcgcgtaagttccaaccattggtccaactttcaacatgaactttagcaaatttatcttgtggtaatttttgataaacatttaagtttatttctttccaggtctgccaaatttctttaaaatctgtttttatttgcgctaattcatcttcagaatattgcgatttcaattttttaaaagaaaattcatcccgatcaaaaattgcatacatttcttcagttaattgcgtcattttacaaagcccttaccatatttacgctagtaacaccagttggatctggaatatcatcattggtctcgccttcattataaaaaccacgtttttcataaaatttaatcaatttcggtaaacaagttaaagatatagcttgacgattttgctttctgccctcttgcgctattgcttcaattaattttgtcgctacgccttgtttacggtattcaggcaagaccgctaagctcaagaccatttgatagcgatcatctttttgattaggatgattttcaaaatataattcatcttcaatatagcgtttattaaaagcaggaccaaaaatatgaccaatcacttttccatcttcttgtgcaactaaaaaagtatcaggataattctcaattctaccaatcatatcttgttcagtttgctttttagtcatcttaaatgcgtcagattccagttctactacttcatttaaatcatccattgttacggtgcgaatgatcataataagcatcctccttaggtttatctctaaaagtgaaaaagggttcaaaagtcatctagactcttgaaccctatattattactctctatttaattcttccactttaatttaagacgatcttgctcagtctttttttgaaaatacgtcttcaccttcggtacaacttcttcgccataaattctaatggcattcatcacatcttcatgcggcattgaagcaattggcaaatgaagatagaagcgagttaacccaagttcttccatgactttgatgatcttatttgcaactgtctcgctatcaccaacaaaaattgcaccattttctccgaccgattcaagatattgttcatatgtcatccctgtccattgcggtctttccgtactaatttgatcaactaacaatttggtaggatagaagtaatccttaattgctttgtctttatcatgatttaaccagccccaagagtgtgcagcaattggcatcttcgttaaatcattgccaactttttctgcaactcttctgtacaacttaattagtggtttaaagtgcaaaggatcaccgccaattatcgcataaacgattggcaaacctaactctgcagttcggatagtcgattctatgcttccgcctgtagctacagaaatagggattggctttttagtgcgcggataaattcctttatgatcaactctaggtgtaaactttccttttggcaaatcgagaatttcttctttgttcattttgagtagcatttctagtttttcaataaaaagttcatcgtaattttctaaatcataaccgaatagatcaaatgcctcagtaaatgatccacgtcctgccatgatttcaactcttcctggtgcgattgcatccattgttgcatattgttcataaactctaattggattaattgttggtagatttgtagtagcacttgaaagatggatttgcttagttttcgaagcagcagctgctaaaatgatttccggtgctgagacagcaaaatctttgcgatggtgttcaccgattgcaaatgcatcaatattcaatttgtctgcaagaatgatttcttctaataagtctctgattctttgatcatgactaattgcttttcctgttgtttctaatggtgtagtttcaccaaatgatgagatacctaattcaatattcatttttatcaactcctaaattatttaacttactttttgtaagtaaaataatagcagataatttttgaaaaagcaatatcttgaatatgtgagtaagtgtcaatgtttttgcggtagcctttaaaccattagtctaaccttaatttcttaaatatttatatgacttaaatttctgcttagcttgcttaaataactattgccagctacctgtgcggttaatgcgccatgctggatgcctaaatgaacttcatgacgcttctttaagctgtcacgggccgctgcttttaattcctgttcagtcaatacagttatttctgaatcttcaaactcgctgctaagccaaaattccagctctcgattcttgatgcagcttaagatcctaagcatgccttctgctccagattttgaccatttcttgccttgccccttaacacggtaggtatacttgcggtggttgctctcgcagcagccaatggctttagtcacagtcagttttcgtttcttaaacggcttaatatcgtcccaatgacgatcaatataattccttaggcgccccagataatcatgattgagctcggtattcaattcatcaattagtcggctttctgcagtggttaggatagttttaactttgtcatagctgtatttgtattccaaagcagaaatcagcttgccttgcaggtcaggcgcaaaatatagcctttctttgattttcttatttaggtgaaagacatccaagaaatgctcatgacgcttgcatagccctacaatgtcatcgaagtctgttttggcatatccagcaccgccatcggcgttgctaagaattacagtatcagaaagatcataagtattggccaggtactccttggcttcgttcagcgcatcaagtcggcttaaagaaacaaattccttggcattgattcgctttctgcgtttcttgcttatattgacaatgccttcacagacctgatagcgatgaaattccaaccggcttttagtgcctttgatcaccacgccatcgccttcaagatacaaaactgggacctttttcttagtgcctgcggcatcatatcttgaatctgcttcttggcccgctttaatatttttcccggccatttttaccaaattgcccacctgcatatggctaatattaaagccagacaggcaattgactgctagagcagtattgcgataagtggcaacgctgcttacttctaagatgtttttgactgctaaaatactgtagcgcttgtatttgtcaaagcccattaattcatccaagggataccttgcttgtttgcctgggcagacatatcttcttctgacatacctaacttcgccaaaagccatattgattgagcgctcattcttcttatcaatctgatagccctgtgctttaaccttggtaatcatttcatcatcaactttagctaaagccaaggccatgatttccttaatcaggtttaagaagaaacagattatttttctttcacgcttaatataattatcttcagactttataatatttgcgatttcagttacaattgaattccctgaattgtcaaattaagtgcaacagttaggttatgaagagatatattgcttgaagagttcctctgctgtgtgatattggaggattcggcgatatttgtggttaatggcatcagttgcctgttgaacataagcttttgacttgtctttcatgctcttgcccttagggaagaattgacgcaaaagaccattgcagttctcattggtgcccctttcccatggagaatatgggtgagcaaagtaaatctggcagcccttgatcttggtcatatccgcaaactcagagccattgtcaaacgtgattgatttaaaccaggcatgatgtctgtcaatctccttttgaagcagcctttggcatgtgcttgcccgatagtcaggaatcttgataactacttcaaagcgtgtggttctttcagtcaaagtcattaaagcaggctgattcttgcgtctgacgcctttaaccagatctccttcccagtgcagcggagcttttctgtcttcaatctctttaggacgctgttcaatggaattgccaagatgcttcttgtgcaaagcgtgaccgccatggctgtgatgacgcttgttcctgcgtcttttgagcttcataggcagatcaatattgcttatgtccagcaagccctgatcaatatagcgatagacggttggtgtgctgggacaagggtagcctggcatagtccttttgaattcaccaacgaactcatcgatgctggtggcatcaaatttagctttaaagcgtctggagagcattctcaaaaagacagcataatgcttcaatggattgcgctgatagcagtttttgcgacgcttctcataataaatctgtgcagtatcagcgtaatagtgctcatacaataaatagctgctgtctctttgcaggacacttccgcgtttgatttcgcgactgattgtcgacttatggcagccgacttcttgagcgataacagtacgggaagttatgccggaatccagcattgcttgaatttgtccacgttgtacgctggttaattgatgatagtgcttagaaatgctagaatttgaattggtcataaagatcttcctttcttgatttttcgtcacttcaagtttaggtcttcatggcctttttgtttaacacttagtgttgcacttcaattttaaatccgggtacaattgaattcataaaagaccagcttctaatgtgttttttgttcttaacatcagactactggtctttttgtttgagctcaagtccaaattcaaaggacttgggcttttttaattatttattcaacttaccgtaaaaaattatacacttagaatatgtgatcctttacttagttgcagttcttctaccaacatatttgataaataaagccatgattaaaataactaaacataaaagaaaaatatatgcatgctgtgttccgattctggttaaatcagctgacttagtacctttttgactagaagcaacgattgctgaagtaattgaagttccgacagcaccggcaaattgttgagcagtatttagaatagcgttgccttgagtagtttcactctcatcaatcactgccaaagtatcagtcataacatctcccaatatcattcccattcctgccatgtaaatgatataaactatcaatatacgcgtggtgctagttaaatcgttttagttaataaaaaagtccaatcttgttagactcgacttgtaaatagtaataatagaaaagagtctgatctgattgaactgccttaagcttaagcgttttagccaccatttacaagttagttttaaagatttagtgataatttgtcggcactggtatcgtttgtatgcaccggctgagtttactcatcggcgaaatattgatcaaattaaaactacggacagtctgattttggctttacttatctggcaagctaagacaggaattgaatcacaaagaagattctgtgaatgtttcaattgtttatcacactcacgttttaatcggcgttcacgtcagctattgcaattgatttatcagatacggcaagaaatgaataaaaaggttgacctgaatggacagttcttgatcattgacagctttccggtacctgtttgccaaccaattcgaaactatcgtgctaaaatttttcgcggttatgccaacattggttataaggccaccaagaaaatttacttctatggtttcaaagttcatgccattgttagcgatgacggttacattcttgattatgtcgtaacaaaggcatcagttcatgatgccagggagacagttgaactgatagaaaatacccatccatctaattactatcttcttggcgacgaaggctatttaggcaaagaactgcatcaacagctaaaacaaatgggttacgaactttggacaccatatcgtaaaaatatgacaggagctaaaaagcacaatgatcatcaattgatggctattcgcagaacaattgaaagcgacttttcgcttctgacctattacaatgccgagaacaatcgagcacgtagtctgataggctttcaaagccggttggaaattgcaattttagcttataatttggcttattgtctagaacgatttaactagcaccacgcgtatcaatataaaaatattattcatctgattaggtaatactgcaaaaaacaatgtttcaagcaacatcaaacttacaccaaataaaacaggtttgcgtgcaccataattatctagcaaccgaccaccaattggacccatgattgcaccagcaactcctgctggcaaaacaatcaagcctgctaaaaaagcagtattatgattaaccaattgaatgaaatttggcaataaaaatgcattgcccaaagatattagttgaatgcagaaaaaaccaataatatgacctgtaaaactatgatttttaaataattttagatccaaaattggcattttaattcgattagatctccaaattaacagagctaaagctaataaagcaatcaaaattggaatagcagttgcacccaattgtcctgttcctaagttgctaaagccaaccagcatcccaataaagaagattgcaattatgataaagctaaggcgatcaatcttaacttttttaacagcagatttttgttcaataccccagatgcctaataacaatgaaataataatcaatggaattaaaaaccaaaagacccaacgccaattcaatgcctgtaggacgattccgccaaaggttggcccaagtgctggtgtgattccagtgatcatactgccgacacccatcatagtaccaactttacccttaggcacttgttccaaaataatattaaacattaatggtaaggcgattccagtaccaatgccttgaattactcttccgagcaatagcaccggaaaaattggtgcagtagcatcaactattaagccaagtaaaaacaaaaaattagcggttaaaaatagacttttagttttatatgaactttttaatgcagcagagattggcacgataattgaaactgcaagcaaataaattgaagtcatccattgcacaacattggttgaaacattaaaatcacgcatcaaggttggaaaagcaatattcattgaagtttcaactagaacgccagaaaatgacattaatcccgtggcaattactgctgcaaacacttttgatgatattctttcattatttggttccattttttcctccatttttgacaaattttaaaacttttagtgccgtatttatttcagcttgtgtaaaatgactacgaacttttcgatcatcttgacgcatataatcttttatcttgggaataaatgatttactcttagcagttaaagaaacatccttctgtcttttatcgaccgcattagtaacgcgtttaactaaatctcttttctccattctttgaatcatgattgtcaccgttgaacgctttaaatctagttccttttcaatttcatgttgtgaaacagtttgattttgatgattagaaataaaatctaaagttgtcatttgaacgccggtgatacccaaagtgttagcaaacgtctctcgttcacgatctatttgaacggaagattgcttaataaccttttttatcggttccatataggtcctccttttgttagatgtctaacatattttgcatttatatttgttagatatcaaacatattttttactaatttgagactttagttcaaagtaaatactagtaaatatctatttcatcatttgacgtaaaactcacatctaattctttgagactgtaaaatattttgtgtaaggatgaatgattccttaaatttatttctttaaacattagaaaaaggggttcctttctcgtatgattggtttgaacaaaaaaacacatacagaaagaagaactccttcatgaatgattttaccaaagattttgctcaagctctattcaatccagacaaaataaatgatttattgcgcaaagagctacaacaggctgttaataacttgttagaagctgaattgactgcctttctgggctatgatccctatgccagaaatggctggaatactggcaactctagaaatggtgcttatttccgcaaagttgatacgcaatttggcccaattgaagtgcaagtgcctcgggatcgcaacggtcaatttcatcagcacacgctgcctggctacaagcagcactcggatatcttggaaagcatgattatcaagctttactccaagggcgtgaccaccagggaaatagccgatctaattgaaaagatgtatggcagccattacagtccagctcaggtatcaaatatttccaagcagatgattccaaaggttgaggcttaccacaaacgcaagctaagcgacaagtttttctgcgtctatttggatgcgacataccttcctttgcgccgagaaacatttgagcgtgaagcagtctatattgccattggcatcaagcctaatgggcacaaggaggtcattgactactgcattgcacctagcgagaacattgaagtctggacagatatgcttcaaaacatgaaatcccgaggcttaaagcaagttgagctttttctttctgatggtgttgttggcatgaaaacagccttggccaggacttatcctaaagctcattttcaacgctgtttggttcatgtcatgcgcaatatctgcgctaaagtacgcgtcgacgatcgtgaaaagatcatgaacgaattcaaacaggtgcatcaacagacaaacaaagaagaagccacagctgtcctgcatgacttctataccaaatggggcaaggtttacagccatgttatcagaagcttgaaagacatagaaccagatctgctggtcttttataactatcccaagcagatcagagcttcaatttattcgactaacatgattgaatcatttaacaatgtgatcaagcgcaaagctaagcctaaggcagagtttccaactgaacagtcgcttgatgcttttattggtattcaggcaatgagctacaatgaccgttatttcaatcgaattcataaaggctttggtcaggttcaggacaccttagaatcctactttgattaaataaataattaaaaaatcaatttacgagaaagaactatttacacaaaagatttgacagtttcaattctttactaagaaaaggattttagttacatttgttgctaaaatagatttacccggatttaaaattgaagtgcaacactaagtgttaaacaaaaaggccatgaagacctaaacttgaagtgacgaaaaatcaagaaaggaagatctttatgaccaattcaaattctagcatttctaagcactatcatcaattaaccagcgtacaacgtggacaaattcaagcaatgctggattccggcataacttcccgtactgttatcgctcaagaagtcggctgccataagtcgacaatcagtcgcgaaatcaaacgcggaagtgtcctgcaaagagacagcagctatttattgtatgagcactattacgctgatactgcacagatttattatgagaagcgtcgcaaaaactgctatcagcgcaatccattgaagcattatgctgtctttttgagaatgctctccagacgctttaaagctaaatttgatgccaccagcatcgatgagttcgttggtgaattcaaaaggactatgccaggctacccttgtcccagcacaccaaccgtctatcgctatattgatcagggcttgctggacataagcaatattgatctgcctatgaagctcaaaagacgcaggaacaagcgtcatcacagccatggcggtcacgctttgcacaagaagcatcttggcaattccattgaacagcgtcctaaagagattgaagacagaaaagctccgctgcactgggaaggagatctggttaaaggcgtcagacgcaagaatcagcctgctttaatgactttgactgaaagaaccacacgctttgaagtagttatcaagattcctgactatcgggcaagcacatgccaaaggctgcttcaaaaggagattgacagacatcatgcctggtttaaatcaatcacgtttgacaatggctctgagtttgcggatatgaccaagatcaagggctgccagatttactttgctcacccatattctccatgggaaaggggcaccaatgagaactgcaatggtcttttgcgtcaattcttccctaagggcaagagcatgaaagacaagtcaaaagcttatgttcaacaggcaactgatgccattaaccacaaatatcgccgaatcctccaatatcacacagcagaggaactcttcaagcaatatatctcttcataacctaactgttgcacttaatttgacaattcaggctaaaatagatttattatttctactcaaaataaggagttaatcataaatgaataaactaaacttcgaactactgcatatttttgatgttgttagtagatttgctagcttcagtcaagctagcaactatctctacctagaccaatctactgtcagtaaaaaaattagacagctagaagctattgtcaataagaaattatttattaggaatactaatggtattgtcctcactgctgctggacttgcttttaaaaataagtcagataaaatacttcaagatttaaaagaaataattgcgctaaagccaactataaccaccttacgagtcggggtatttgataatataagtgcctatctgatgcccgatatttttgctgaaaattttaatctatttaatgagggaaaattagatgcaatagttatcaatagcgacttctttactcaaattcaaggttctgcaattgagacgcaaattactaatgaatcttttgcaattctctttcgcaaaaataatgctctcattgcaagcaaaaatagtatttcgttaaatgatttaaaaaataaaaatcgtaaatcaaaataactattataaaaaatatttattggtaatagttagctatgcataaagcgaatgaataaagattattaattagctattacgtttcttaatttggcgattttgtgttaacttgattgttatccaaataacaacgtatgaaagaataaaaataaacaatgtccaaatattgatagaccaattatttaacaacatcattattgagaataagctaaaagttccaattaacataaaaagtcttcctttccgaattcactatttaaataagtggttaaattcaaaatacaggatgctaaaatttaaaatcctaaaaattaatatctgtaagctaaatatttaagttattgaactgagtttgctatatttaagttaaaagataataaaaggaggaatttcatgaaagttacttttaaaggaaaagaagttgaattaattggcacaccacctaaggttggcgatgaaatgcctaactttacagttttagacaaaaataagcaagaagttactaaagataatttgttaggtaaaaatactttaatcagcgttgtgccagacatcaacacttccgtttgcagtattcaaactaagacttttaacaaaacaatggatcagtttcctgacgttaactttttaactatttcaactaataccatcaaagaccaacaaaattggtgtgcggctgaaggtgttaaaaatatgcaattaatgtctgatgaaaaattatcttttggtaaagctactggcttactaataccagaatctggaatactagcacgcagtgtgtggattcttgagcctaacggtaaaatcgtttatcgtgaaattgttgatgaaattactcatgagcccgattataatactgctgtaaatgaattaaaaaagttgctgtaaaatttaaaaaagattgcctcagtacatacacatatgctaaggtaatcttttttttctacccaaagtcaagtattatcaatgatttaagaaaataaatttacttgttttaatgatgcgaataaggttaaagcaaataagagtttaaatttaagaaaaagcgaaagtaccacaaataagcctatgaatacttgtagtttttccataggttgcttatacttaagttgattatttgatttcagctaaagtcttttattttcggtggctatgttgtaatcatataattgatcatgtttgataagagcaaacattgtgcgtatcagtttatggactgatgcaatggcgattttcttatagccttgtctatttgaagatcgttttttcttgtcataataatcagttatatggcaaggctgcgtagcctttaccgtctccatttgagtaataactcgataaagtatttttctggcaatatgattgccatgcttggtaatgccaagagaactgtctttttcaccagattggtaccttcctggatcaatgccaacaaacgcatcaatttgagctgaagtgctaaaccgtcttagatcaccgagctctgctactaatctcactgctgcaattctagcaacccctgggatactcaaatagatggataaagcacgagcgtttactgctttagccagcttttccatgtagttaattacatagtcgcgttcttgctggagtgaaaataaattagaaatgttcctttgaatagctctaacgataatactatctttggaatcataaggataagcttctctagcaaaagcgtataatcttgtggttaagtaccgtgccctttgttgtcctattccagaaatagaattaagcatttgagttacctgtgtctcattcttttctagaacatatccagcatgtgggaaaagactaacaagcgcccaataaattctgccagatggatgagacagtatttcttcaatttgtgggaaagtggattggaggttgcggtgcaattgatttttagtagtaactatactcctagtaagttcttcataatagcgactggcattctgaagttcatgatactctctgggctgtggatcacgcagcttttgcggggcattaaattgaattaaagccaggcgataagcatctaccttatcagttttattatggcgtaaattattgtccattagctttttcgctttaagcggattaagcttcaaatacttaatatgataatcctctaagaaagcttgcaggcttagagaataaacaccagtagcttcgaaaacaactaaaggagttatcaaatattggttcagttgctcataaagtttttgatagccaaaggaatcattagagattctaaaagattcgccttgtttgatccggtcattaaccacacaaactgtggaagatttactgctaacatcaataccgaaaataatttgtgattccataatataacctccgctgtgaagataaacctctttatcaacctattaattctaattttctaaacacggcatctaagtgcccacagacttcgaagagacttaagaataggtggtaaagcagtccgtttcttttacgacatcaagtgtctaaaaagctgaagacttgatttgctttatcttcactttctattttagacaaaataaaaagtgccagatcgtgaatccgtcgattcatgatccaacactaggttagtatgtttctttagttcttatattgttccattctttgattaagttcttccttattaaaattatctaaattaattgcttttccacccattaaccaatcaatcatttcaggatctactttatctttaggcgtatcgtaataatcttgcaaagaccatacaccaccaatgtcatcaattattccataaccttttccagaaagtatctttggacacttaggagctgcttgatcagtagtgatgttcttaatatctacttcgaattcccagctatcgccataatcataagttaataataatttatctctcttttcaaaatacgaaaccttagctttttcataatctatgcctgtagccggatcccaatctttcgcttcagcgatactttctgcattttcaaagcgttcctgcgtttttttattcagcaaatcaaacatatgtccaaaatctgcattaaacatatctagcatagcaacttctaatgttttcactgacgtattgccactaataataaatctacgccaagtagatggtttaaaagactttagttttactctaatttcataggtagctcgattgcgagtttgattttcaaaaattgtcttttttcgtgttttctgctttttatcatgactctcaagatcttttcgcaagccttctaaaattctagacaaatcctgagaagacagatctaaatcttcaagttccaaaatctttttaggatttgcttcaattgccgctatcatatcgtttatcaaatcctcatccaggccttgatcggagtatgaattaatttcttcaactacccagtcaatattcatccctatttctttactatcagttttacgaataagacctactctactcaaaaatacatagaaatttttcaaagtatttgtaatctgctctatttctagcggatgtagtttattgttagatatcataatccataaataagaaatcgcttctcctaaatcattagtaactaaatggatcttattacgtaataaataatgatttagataatccggcagcatttgatcaggttggatatatcctattcctgctggtacatatttagcatattgatcaatgagtttttgattattttctttaattttagcaacaatcttttcattgccttttactggtttattttcatatttttcaaaattagagaaatcttcaaattttggcactaagtcaacatacttatatcttcgatttggtttttgcggcttaatagggaaatacgtactaacctcatcaatcatcttagaaataaaattttgtccaatctgactatccaaggcaaaaatagtcgctgacattacagttagcttatctacgatattcttttcatcttttacaacatcaatcaaatttaaatattcgctttgattatcctctataagtttacgaattttttctagcattaaactagcttggcttttagtatcgtaaaaagacatttgcttggactttaccgctgaaactaatttttgttgctgtttaaacaaaataaagtcatagcttttaatcgcattagcaaaaacatcattaaacagtttggtatcaagtttagttaataaaattggaaaactagtgtctttttcaactaataaatagtacttttgcttttgaatatttattacatctgcatcccaaacagtaaaaggctcattcttaataatatcaatcttattttctttaatttctggtgctaagttaataccgtatcgtactggaagcatgtggttctccttattaaaataatttcattttaattttatcatgtctattcacaactattcatctcagaagcaaaaaaatgaaggcaatcactgccttcatctaaaatacacaaattttagtcttcttctaaaaccggtactgtctttttatttctaacatgatatacaactaaaccaattgctaaacctaccagtgctggcactaaccatgataagcccatgctggcaagtggcaaatgatttctaagtgaagccactgctaaaccaaatgaactttgactaaccacacttgggaaagcaactaccatatcgcctaaagctggtacaacagtaaataggattacgaaaaagtaaactacacctgccttattaaacaatggtgaacaaactgatagcaagatcaaaaccatggataaaggatataagaacattaacattggtgttgaccatgaaatgatttgatccaaaccaaagttagcggctaagaatgatgccaagcaactaagtgctaaccaaacgtggtaacttaccttaggaaaatgcttatgaaagtcttgcgcaaaagcagcaaccaaaccaactgcagtagtcaaacaggtaactgtcaataagaatgcaagtaaagcttgaccaaagacaccgccataaacgttaacgatttggttaaaggctaccccaccgttatcagaaactgcaaagcgtccgagtgacattgcacccattaagatcaataacaagtagataaaaccgatttctaaaacggccaagacacctgatttagcaacaacttttgaaacacttttagcatctttttgtcccatgccgcgaacagctgtaacaaccgtgaccccaaaggctaagcctgctaaggcatccattgtgttataaccttctaagaagccatttactaatgctccatgcttataagctgcagttactgctgcagtttgtggattacccaacggacgagcaaaagctacaagaaacactaggaataataatgctaagaataatgggtttaataccttaccaacgttagacaagatattattttgatgataagaaaaagcaaaagcagctaaaaagaataaagctgaaaaaacaagtaaagcggaactttgcatattcttcggcataaatggtgcaataccaactgtgaaagaaacggttgcagttcttggggtaccaaacaatggtccgattgtggcatggattaaaaccataaatactactgcaaatccggcacccagcggcttaccgatgtcgtatactccgtctgcatgagtaattgctactgctaatacagagaataatggtaataaaacccctgtgatcaaaaagccaactgcagctgttccccaatttgctccagctagttgtcctaaatgtaatggaaagattaggttaccagccccaaaaaataatccaaacagcaaggaagcaacaacgagataatttttccatgtaagttttttcgatgtatgatctgtcattttctctcctccaaaacatccctgataaacaaaaaaggccctcagctgcaaattgtaactgagggacgctttgagcgtggtaccaccctttatttatatcactattgctagcaatacctttcacgtacagtcaactacttgacgatacgtaggcactataatgggtgctcccactacttcttactttaagttaagaaatagaactcgaaagtgattttcatttaaacttaggatttatctcctcacacctaacgagactcgctgtaaattaagtctaaattactcttctttctctttgttttcagatttattaaatttgttaataactattttaatcaaaatataatcgttgtcaacaacttttttatttatttttcaaattttctattccccggatttaaaattgaagtgcaacactaagtgttaaacaaaaaggccatgaagacctaaacttgaagtgacgaaaaatcaagaaaggaagatctttatgaccaattcaaattctagcatttctaagcactatcatcaattaaccagcgtacaacgtggacaaattcaagcaatgctggattccggcataacttcccgtactgttatcgctcaagaagttggctgccataagtcgacaatcagtcgcgaaatcaaacgcggaagcgtcctgcaaagagacagcagctatttattgtatgagcactattacgctgatactgcacagatttattatgagaagcgtcgcaaaaactgctatcagcgcaatccattgaagcattatgctgtctttttgagaatgctctccagacgctttaaagctaaatttgatgccaccagcatcgatgagttcgttggtgaattcaaaaggactatgccaggctacccttgtcccagcacaccaaccgtctatcgctatattgatcagggcttgctggacataagcaatattgatctgcctatgaagctcaaaagacgcaggaacaagcgtcatcacagccatggcggtcacgctttgcacaagaagcatcttggcaattccattgaacagcgtcctaaggaggttgaagacagaaaagctccgctgcactgggaaggagatctggttaaaggcgtcagacgcaagaatcagcctgctttaatgactttgactgaaagaaccacacgctttgaagtagttatcaagattcctgactatcgggcaagcacatgccaaaggctgcttcaaaaggagattgacagacatcctgcctggtttaaatcaatcacgtttgacaatggctctgagtttgcggatatgaccaagatcaagggctgccagatttactttgctcacccatattctccatgggaaaggggcaccaatgagaactgcaatggtcttttgcgtcaattcttccctaagggcaagagcatgaaagacaagtcaaaagcttatgttcaacaggcaactgatgccattaaccacaaatatcgccgaatcctccaatatcacacagcagaggaactcttcaagcaatatatctcttcataacctaactgttgcacttaatttgacaattcaggaaattttctattcaaattgagtcggccgattgtaaaattaaattgaacacttgatagaaaataaaaagtccatttggacctgtttgatagaatgttaataaccacaaaaacatctatggaggtcaaaatggactcactacattctatcatggacaagcgtaaaaaaggaacacatctatcgcttgaagagcgggttattattcaaactcgtttgaaagatcattgttctttgcgttccatcgctcgagaaattggctgttcccctagtacaattcactatgagattaagcgaggaaccgttaagctgtatcacggcaatatcaaacgttataaagcccagcaaggccaaagcgtttatcaaaaccatcgtcagcactgtggtcgaaaatctgactttctcaaaaagcacaaatttattgattacgttaaacggcacttctttgaagatggctggtcactcgatgtctgcagtaatcgctgcactgctgtgggtgaatttgccagcaacgatattgtctgcaccaggacgctttataattatgtcgatcaaggcttgttaaacatccataactatgatttgccagagaaactcaagcgcaataccaaaattcatcgcattcgtaaaaataagaagaagctaggccgcagtattgaacaacgaccacaggaagttaataagcgtgatgtgtttgggcattgggaatgtgatcttgttttaggccataagaccaaggacgacgaagtgctgctaactttgtctgaacgcatgagccgtgagttcctaattattaaaatcccagataaaacagctgccagtgtaatgaatgcctttaaaagtctgcgcaagcaatacagcgagcattggaacgatatctttaaaactattacgactgataatggttctgaatttgcggatctatctcagctggaagatatttccaaatcactagtttattatgctcatccatatacttcttgtgataaaggcactgtagagaggcataatggccttattcgcagattcattcctaaaggtgactatattcataactactctctccaacaaatcattgacattgaaacttggtgcaattcattgccaagaaagatcttggcttatcatacaccagatgaaatctttgaaagagaattagatcgcatctatcaaacagcctaaacaaaagtgttcaagttattattgcaatttacgattcaaattgagtctgccaattaggatcattatttgccgcaaaacacatggtaatttgttcctcagtatttcgcccaagtgaaagcttcggtaaattatctaatgcaaaataatcacaggcatcagtttcatcgttcggcttaaattcaccactaatttctttgcataagtaaaataccttcgtaatgttggtggccaaaattggtttattatgatgattacgatcttgaactgcaataattttgacgggtctaactactctacctgcttcttcatatgcctctttaacacaattttgtgctgtagtttggtcataatcattccagccgcctggcaatgaccattcctgagtcattttttcacggacaagcaaaattttattatccttaaaaattgctgctcgcgtatcaatcttaggtgtttgatagccctcatcacccaaaaagagtgttttaatttgttctttaggtagtcctgtcctagctgccatcatttcgcctgcaattttacggattttttcatagcgctcacgatcaaatacatcatgaccataatgcaatcctgcttgagctaaactttgtaaatctgtcgcccacttgataaattgatcatctgaattcatttttattgcctttaatataaaattctaagaaaaataacaaattccaaattaataggtaaattgaaatacctattttagattttatcacaacccataagtaacttactcctagtgcaaaaattagtagcaatgttaacagattacgaatactaaatcgacattcactcttgttatatacttgatttacgcgtggtgctagttaaatcgttttagttaataaaaaagtccaatcttgttagactcgacttgtaaatagtaataatagaaaagagtctgatctgattgaactgccttaagcttaagcgttttagccaccatttacaagttagttttaaagatttagtgataatttgtcggcactggtatcgtttgtatgcaccggctgagtttactcatcggcgaaatgttgatcaaattaaaactacggacagtctgattttggctttacttatctggcaagctaagacaggaattgaatcacaaagaagattctgtgaatgtttcaattgtttatcacactcacgttttaatcggcgttcacgtcagctattgcaattgatttatcagatacggcaagaaatgaataaaaaggttgacctgaatggacatttcttgatcattgacagctttccggtacctgtttgccaaccaattcgcaactatcgtgctaaaatttttcgcggttatgccaacattggttataaggccaccaagaaaatttacttctatggtttcaaagttcatgccattgttagcgatgacggttacattcttgattatgtcgtaacaaaagcatcagttcatgatgccaaggagacagttgaactgctggaaaatgcccatccatctaattactatcttcttggcgacgaaggctatttaggcaaagaactgcatcaacagctaaaacaaatgggttatgaactttggacaccatatcgtaaaaatatgacaggagctaaaaagcacaatgatcatcaattgatggctattcgcagaacaattgaaagcgacttttcgcttctgacctattacaatgccgagaacaatcgagcacgtagtctgataggctttcaaagccggttggaaattgcaattttagcttataatttggcttattgtctagaaagatttaactagcaccacgcgtacttgatttatagctaatgagaaataatataaggccattgaaaaaataatcaggaaaaacaaaaaagttttatttatgtcatgcacttgtaaatacagtattgctactgttgacaaaaatattgctactacaattgcaatatgactatacattaaaacaaagcctttacttatctgatgatggtcaattaatttatctgataaaactacatagcttgcaaacatcaatactaaagataaaaacaaaaaagcagcataaactaaaggtgtcttactattgaaataacttgtcaaattaacgatagcctcaccaaaggcaataattacgattaaacttactctctctaccaaatgagggaaatttactcgttcagttttaaacatcccttttaaaaacaatggcaaaataaaaccaacaatataaccacttatacaaaaataaattccaacagggtagccgatgattaatcctacaataattaagataaattctattcctaaaatgattaaaaaggcttgtttatcattattatctgcttttacaaatagatactgacaaaataaaattaagatcataacagccattgcaatattaaaatagtgaaaagtaacttgccattcagtattaatattgttagccagataaactgctacaaacatatttaaacctaaaccgccaatatctaaaaattgatttttgctatatcggttaaaatagataacttgataaagccaaatttgcattactacaattacaaccaataaaaattgaagaaaagtaactaaaggtatactgccattaacaggatgatgaatcattgcagtaattcgagaaattgcgtatacaaaaactaaatcatagaataattcaaacattcccacaggcttagcgattatttttttcatactattccctcctcgtattatataaattaaatcagtgataatgattattcttttagtttgtttattcgatcatcagatgctagtctctaattgtcattgaccttggtcaattggtataggttgtttccttctgtagctttgactacttttttagtctgccgcccaagcagttttactaatgacttactcacatgctgtatcgattctggctattactgattcagagcagattcagtcgcagctttttagcttgaacctatgaatactcatattttgcgagattgtcttagaatctgtaattagggactaacatgtgatgatcgatctatgaccaaatatttgctagaaaggaggccattctcaatgaaactttttatcggaattgacgttagttcaaaagatcttcaagtcgctattactgactcagaaaattatcaaaaacctttacttaaccaatctttttctaatgacctgattggtgctaatgaggtcaaaaagataattcttcaacttgctaaacagaacagctatgacaaagtaattatcggcatggaagccacttcaatctatagctttcaccctgcttatttctttgccaatgacgaagatttacaaaaaattaatcttgaaactgatgtcattaatcctaaaaacactaaacgatttcatgacgtttacgaagaaaataagaatgatcctactgatgcctattacatcgctgaatacttacgctttggtaaataccatgtcactattgctcggcaagaggaatacttagctttacagcgtttaactagagctagatatgaaatcacatcttcgctcactagagctaagcagcacttcattgaaactctttattatcgtgtaaacaaactagttaccgttgacaaagacaatattaaaacttctatctttggcgcaacgatgctgtcaattgttactgatagtaaaaccatcgatgaaatcgctgaaatgccaatcgaggatctaattgactaccttcaaaccaaaggacgtggccgcttctctgatccagagactttagctaaagcgatcagaaaagccgttagaggatcatatcgcttaggtaaagtcatgaaagactcgattgatgccgtattatctgtttactatgccgaaattaaaactaatcagaaattgattaagaacttagataaagcaattacagatatcgtccaaacgcttcctgaagagagaatactacaatctattccaggaattgggtcagtttattccgctggtattatcgctgaaatcggcagtattgatcgctttgacactgaagcacagctagctaaatacgctggtctagcttggcgtcaaaagcaatctagtaattttgatagcgaacacaaaccgatgactaaaaacggaaatcattatctaagatattatttggttgaagctgccaacctgattagacaaagagatcccgtttttcggaagtactatcaaaagaaatacgatgaagctttctattctccgcataaacgcgcttgcgttctttgtgcaagaaaattaaccaggaccattttcactctgctcaaaaatggtcaaatctatcaaacaccgaggtgattaattggtctaaaacatttttggaggagtaaataatagttgttaaaaaatcccttgaaatagggcttagtttcatgcacgcaaattttggttttaaaacaaactaattaaaaataaaatttaacttttacattgacttattaccacatgactaatatttgattgctgtttatcatactttatatttgtccaaaaagcaaaatatgatattaatttataagaatcgaaactgtcaaatcttttgtgtaaatagttctttctcgtaaattgattttttaattatttatttaatcaaagtaggattctaaggtgtcctgaacctgaccaaagcctttatgaattcgattgaaataacggtcattgtagctcattgcctgaataccaataaaagcatcaagcgactgttcagttggaaactctgccttaggcttagctttgcgcttgatcacattgttaaatgattcaatcatgttagtcgaataaattgaagctctgatctgcttgggatagttataaaagaccagcagatctggttctatgtctttcaagcttctgataacatggctgtaaaccttgccccatttggtatagaagtcatgcaggacagctgtggcttcttctttgtttgtctgttgatgcacctgtttgaattcgttcatgatcttttcacgatcgtcgacgcgtactttagcgcagatattgcgcatgacatgaaccaaacagcgttgaaaatgagctttaggataagtcctggccaaggctgttttcatgccaacaacaccatcagaaagaaaaagctcaacttgctttaagcctcgggatttcatgttttgaagcatatctgtccagacttcaatgttctcgctaggtgcaatgcagtagtcaatgacctccttgtgcccattaggcttgatgccaatggcaatatagactgcttcacgctcaaatgtttctcggcgcaaaggaaggtatgtcgcatccaaatagacgcagaaaaacttgtcgcttagcttgcgtttgtggtaagcctcaacctttggaatcatctgcttggaaatatttgatacttgggctggactgtaatggctgccatacatcttttcaattagatcggctatttccctggtggtcacgcccttggagtaaagcttgataatcatgctttccaagatatccgagtgctgcttgtagccaggcagcgtgtgctgatgaaattgaccgttgcgatcccgaggcacttgcacttcaattgggccaaattgcgtatcaactttgcggaaataagcaccatttctagagttgccagtattccagccatttctggcatagggatcatagcctagaaaggcagtcaattcagcttctagcaagttattaacagcctgttgtagctctttgcgcaataaatcatttattttgtctggattgaatagagcttgagcaaaatctttggtaaaatcattcatgaaggagttcttctttctgtatgtgttttttttgttcaaaccaatcatacgagaaaggaactcctttttctaatgtttaaagaaataaatttaaggaatcattcatccttacacaaactattttacagtctctaagaatcagtttttagcttgattgtgaaaaattatgctaaagtaattattgattaataaattaatttaattggaggaatagccatgccacgaaatcccagaagacacaatcttaatcaattctcagaccaagaaaaagataaattaaaaaatgtcaaaaaagaattagctgaggcccaaaagaaagagcctgaaagtctacaagcctttaacgatggagtgatggccattattattacaattattgttttagaaattcaacctgctctgcatgaaattcattatcagcaattcattagcaatattgctgtctttttaatcactttttttattgtggcagatttctggtatgatctacatttatctttttcatactatattttcaagccttcaaaagcgattgctattctagacttcttttttttagctgatttatcacttctaccagtcatgactaaatggattatggctgaaaattcttctttcgctgtagctaacttgggaattgtttttttaattgccaaaatcttagaatatctaattcaatattttggtgctaaaaatactgcgcgctattcccaaatcatgcggattattattagccgctcctttattagaaaaatgacggttactttatttttaaatgtaatattgatcattctgtcattattcaatgcaaaactagcaatgattctttatctaatagttccagttatttcatttctttttccagttaaacgcaacaaaattatgtgatttttatttaaaagagcgccagtaaactttaactaaatctactggcgctcttttgttacttttcttgttccttacaatgactcttgcaaacacattctttactatttaccattttgcagtggcaaatgccatccttatctgcacaaggacaatttttctgacatttcatttcatcgtgacaaaattcatttttcatgtttatcatctctatattattatgcctatgataatcgaactttccaaccaatatatcttataattttacttttcctaataagattattttatagaaatatctagttaatttgttaatttaatctgctgatcagctaccgatgtaatgaagtaaggatcatgctcaattagtaacatcgttggcttcacactcttaagaagcttaattaattgatcttgattgaatacatctaaataatttgctggctcatcccataaatataaattagcaggttctgtcaatgacttagccaaagctactcgtttctgttgtcccatactcattttttcaattctagttgtaaaatcagcacgcgcaaatcccattttcttaagattgctcaacaaagcttcataagacaaatgatattttttagcaaagtcttttaatgatccgctatacattacaaattcttgtggtaaataagagattttcaaactttcaattagctcataattacctttggcaattagattttgagagatacccagtaaatgcttaattaatgttgactttccagaaccatttttaccttcaatagcaataatttcatgattattcaaagacaaagtcaagcttttaaatagttctctactattttttagttgcaagctaagatcattaagttgcaaaatctcacgatgataatctgcctgaaaattcatagtcagagtaggaactttttcaatattctttagcattccttctttttccgcaatcctcttatccatgcgattgcgtgcattaatcgacttcttcatcatctttgcagcttgatgtccgatcgctcccttatttaatctggttcgacgattgataatatgctgtgttttcatccctaatttcttacgtgcctctattttagctgcccaattatggaattgtaccttttcttggttcaattttttcacttgccctgtaagctttttatttttttcacgatcaaaatcatctcgcctttttttagttacctcataagtcgaataatttccttgatacaaatgaatcgctgtattttcaatcgctaatatatgatcagttacctgattcaaaaaatctcgatcatgactgactacaatatatccttgataatgcccatttaaatattctgctacttgtttacgacttgtctcatctagatgattagttggttcatcaattagaggaaaagaatcttgatctgtaaatgataaagctagcaaaattttagtttgctcaccaccactcaaggtattgaaaggctgccataataaatcgggatctaaattcattagagttaactctcgttccagcttccattgttcaaaggcaacctgatcttgtaactcataaaaagtaatgtttttagaattttgaatttttacaggataatatgaaaagctagcattaccttgaatttgaccagttccacaatacttacctcgcagtaagtttaaaaaagtagttttacctcttccgtttcgaccaatcaaacctagtttccaatcagtatcaaggtctaggttaagatttttaaaaatatatctattgctgtcttcatattcaaaagataacctactaatcttaagattactcatccaaccacctcgcacaaaaagagcccatacttctagcaagcatagactctctccttacgaaaatgaattgtaataatcgaaggcctgggctttaatcctgctaaaagtacatagtctctccataatataaattactatttggactatgatgctaattacaagattaaaagcgcaacctaaacccttctttcattgaataatattatactgtaataatagcacctgttttattcttttacaatagatatattaagtaactctatttattccataaaaacttaattaatgcttgatcaacttgagcattttcatgcagttttgaatgttgtgcatttttgccattaatcttttcaactttataagtactgtcaccatcaccaataatatttaggacttgaacatgctttttcatataaagctctcttacacctgtcatttgctgataagttgagtttatcttattaggctttccattaatattcaatcccattcataaattgcatctatataatttctaataaattgctcatactgcaccttaagttacagtatgagcaaagttaatcctttttttaatgtatttaattttacgaccgatgaatacatattattcactaattagtcctagacgctttcttactcttaatacatgacaaatcaatccaagaattaatcctgcaatcccaaaggtcagccacccaaagcctaaattgaaaaatgggaagtactgttgggcaaaaccaagcagtgtctgtaataatcgactttcatgtaacccagctggtaacgcatttaacatgtcaaagaatgctggaattaaggtaagctcagttgtaatccggtaaacgagccggtcattcttaaacagtggtgaaagtagccctaaaataattaaggtaattgctaacggatagaggaacatcagaattggcgttgaccatgcaataatctggttgagtcctaaattagcaaatagaaatgataatccacaattgattcgtaaaaatgttcgatacgaaattttaggaaaacggcgatggaaatcttgcgagaaggcaattactaatcccattgctgaagtcatacaagtgatagttgctaaagttgctaaaattgcatctccagcagttcctaagtaatggtgtgaaatctgagcaagagtaattccaccatttgctgctaatttaaattgatgcaaactagtcgcgcctagccaaattaaagctaaatagataattgcaactcccgcaattccgagaaaaccactcttagccgttgcaagtgaaatttgccgtgtcttcttaatacctaattctctaattgcagtaataatagtaattccaaaggctaatgctgccaagccatccatagtattgtaaccttgcaaaaagccattggaaaaagcatgccttgcatatgaagcagttatagcagcagtatttctagaacccaatggattaatgaatgctaataagaagataaggaataataataacaagaacaagggatttaaaactttaccgattaaagtagtgatctttccctcatgatttgaaaaaagataaactaaactaaagaaaattgctgagtagattaataatcccaaagtattagttgacttagataaataaggggcaattccaatttcataaggaacagtggctgtccggggagttgcaaatagtggtcccaaagtagcgtgaacaagaattaaaaagataagtgcatagtaacgaccattcggcaatgcaagatcatagatcccattcgacttggtaatactaattgccaacagcgccattaatggcagtaaaacaccagaaagcagaaagccactactcgctattagccaattactacctgctaattgacctaaatgaactggaaaaataagatttcccgctccaaacaacattccgaaaataagtgatgcgataatcattgaccgcctaatactcgcttttttggttttcattttaatattcctttcgataaaaattatattaatactaggtacaaaaaaacgtccttataagcataaagcttataaggacgctatcacgcgtgttaccaccttattttagaataatattactattattcccttaccccatacatagcaaaactagatacgttgacgctataacgggcgcgccctcctaaagttacaattactctcacttcaagcactcataggctactttcactttacttttctatccccactcacactaatttgggttcgctgactagttaaggtaaagctaatttcctattcttagtggttattcataccatttatttagtaagtatattacataataaatttaataaagtcaatattattctaaactattttcccggatttaaaattgaagtgcaacactaagtgttaaacaaaaaggccatgaagacctaaacttgaagtgacgaaaaatcaagaaaggaagatctttatgaccaattcaaattctagcatttctaagcactatcatcaattaaccagcgtacaacgtggacaaattcaagcaatgctggattccggcataacttcccgtactgttatcgctcaagaagtcggctgccataagtcgacaatcagtcgcgaaatcaaacgcggaagtgtcctgcaaagagacagcagctatttattgtatgagcactattacgctgatactgcacagatttattatgagaagcgtcgcaaaaactgctatcagcgcaatccattgaagcattatgctgtctttttgagaatgctctccagacgctttaaagctaaatttgatgccaccagcatcgatgagttcgttggtgaattcaaaaggactatgccaggctacccttgtcccagcacaccaaccgtctatcgctatattgatcagggcttgctggacataagcaatattgatctgcctatgaagctcaaaagacgcaggaacaagcgtcatcacagccatggcggtcacgctttgcacaagaagcatcttggcaattccattgaacagcgtcctaaggaggttgaagacagaaaagctccgctgcactgggaaggagatctggttaaaggcgtcagacgcaagaatcagcctgctttaatgactttgactgaaagaaccacacgctttgaagtagttatcaagattcctgactatcgggcaagcacatgccaaaggctgcttcaaaaggagattgacagacatcctgcctggtttaaatcaatcacgtttgacaatggctctgagtttgcggatatgaccaagatcaagggctgccagatttactttgctcacccatattctccatgggaaaggggcaccaatgagaactgcaatggtcttttgcgtcaattcttccctaagggcaagagcatgaaagacaagtcaaaagcttatgttcaacaggcaactgatgccattaaccacaaatatcgccgaatcctccaatatcacacagcagaggaactcttcaagcaatatatctcttcataacctaactgttgcacttaatttgacaattcaggttctaaactatttttaattttatacttttcgttttgacatcaattggtttcgaatgtatctgcgaaatgcttcatcaccaagtttttgacgcttttcatataattctttggtaatcttaccagtaacataacacatccgatcacgatccttatcagtgacagccttaaagatatcttgagccacttcctcaggcgattctaaactatctgtgtctggcattaacatttttgtttgattttttagtaactgatcaaatcccggcattgcgaatgtctccatcttaaaaccggttttcacaacccctggaacaatgattttcacctgaatgccaaatggcgctaactcatgataaagcatttcacatactccagtcaccgcccacttatctgctgcataaataccatctagagctaatcccatttctccagcaagggaagtagtagtcaaaattaacccacttttcttttttttgaaatatgggataaatttttgggtgacacggatcattcccagcaggttcgtgtttaaggactgctgcatggcttcttcggtcatgtcctcaaagcgagacttcatcccataaccagcattattgaacaaaacatccacctcatgctttttaagaacttccgagactgtctgagaaatttgttcaggcttcgttacatcaagtggataaataaaaacattttgataggatgttaattcggtctctttttcaggtgaacgcatagtagcaatcaccgttcaccctttttctgcaaataattttgctgttgctttgccaattccggatgacgaaccaacgataaaaattgtactcatattcactacactccttatcttaagatggacgattaaattattcactgacgataattaatgacttgattgcttcacgtttatccatcacttcatatgcctgttgaattttgtcaagactaaaacgcttagtaaagacttttcctggatgaattttaccttttaatacagcatcaagaagaatcgcacgatcataagtagtgacggaagcaattcctccgcgaagaccaatgttcttccagaaaagcgtgtttgatgatggttcggtttgtggaacacctactcgaccaacaattgcgcctggacgagctaacttgccagcttgttcaatagcagatacggccccaacacattcaagaaccttcttaactgcatcatcaccacgtaatttagcaccgattacaccacaaaggccaacagcaccatccccgataactgcgaccgtatcgtcttccttggcttcagcacttgcagccgcatggtaaccagttgccatcacatcagctaaagttaaaagatcgtttaattgctcgtccgtgtaatctgaggggtgacctggaatctttactaatgcccagttagcattagtaaaacgaagatattcaccttggtaaccaccattactgccagcttcttggttaacacagttgccatcgaaaccagctaaacaagctacgcagtgaccacaaccatgagtaaatggtgcaattacaaaatcaccaggcttaatatctttaacgttatcgccaacttcttcaacaattgcaattgcttcgtgtccaactaatgatcctttttcacgattagtaatcccacgataccaccataagtcggacccacatacacaagcacgaacaatctttaaaatcgcatctgttggcttttggattattggcttttcaacctcatgaacttccatcttaccagattccataaatacagctgctttcatctaaattcgctcctctaattatttttacattgtattaactcaaactgtaaaccttaaagtccactacaaggcaagtaaaaatttaactcggcttattaatgccaatactttcgcaggaataaagctcatcatcgttaagtaattttgtaaccaaatcaacgattgattttattgaaacatcgggaccaccaaatggttcgcccttatgagtaatttcataattaactggaccaccagtaaaccagccgggacgaataacggtatagtttaaattagacgcttccacgatgtcagcagcgtcccgatatgattgaagaattgggttgctttccaaattactactaataccaattgaagcaggaatctcattataaattcccatcgaactaataaatatcaatcgtgatatgttattacggtccatcgccgcaataatctgcttagcataggcaactaagtcaccgcttaatgctgcaaacaccgcatcctgtcctaccaacgctttgtctaaatcgtgatcatttaatacatccccactgattacagtttctcgttgaggatcaataacattaattcgattggctgaccgcgcaaataatgttaagtgattgtccgtttcatttaatactgtttgagtggttgtagtccccaatgctcctgttgctccaataattaaaatattcttcataacatttgacctcctttaataagtgctggcgatctgcttagtgatcgcccatttaccgttaatcttcgcaaattccatcttcatttgaagcaacaatgtacttactgggcttccccaaacgctagctttaactttattgtgaccaattaagctagcgtgattcccagcaatctgaatgtctgagatctgctcctcatcagaagaataatacttaagctcaccattttggatttgatcgatccattctagtttgggctgagcatacccagtcatgtggtgtaataccatggttgaatctaaaatctgacccaaggtttcaatgtctttatctacgattgcccgattttcctggcggtaaaggtcaataattacctctttatctgtcatcaaatcgtcctttgctaataactgttccatcaaagccttatcaaaaccagtttttctctttttgctttgattaattgtctatatcataacgatcttcaataactaaaccaattcacatttacaattaataatcataagtaaaacttatcaagctaaattcttatatacacaaaaacgccaaaaattagtgaagaagcttctttttgacgtttatttttacctcatagtctatttcttaaaattgtttctttaatagctcagcaaacttttcaatgtaaaagcctgaattatcttgtttccaatatgtatagtaattttgttgaaggggaatatcaccggcataaagcggaattgtcttaacagtttctttattaatcatcgcttgagttcgtttattaacaataaagtacccctgattggctgctaccattatttgagcctcatcgatagtagtaaccgttaaaaaccggctttttattcctaaagcatcccgataatattgttcctcagccgctttttgtgtttcattaacaattaaaatgcatgataagtcagctaattgcgttgctaaaatacggttattatctggatagttcaatggtaaaactaccataaaatcagtttcagttaagaattcattgtggtattcgtttgataaagcacgccgctgatcggagaaagccagatcaattcgatcatgttttaataactcaaataactgttcatgagttccgcttttgattttaacctcgacttctggatacatttgcgaaaaatgggcaacagtatgcaaaaattcgttagtaccaaaattcgataaatagcctaaacgtaattcataattgattggtaatttaccaattttttgtgtctgatcaattaattcattagttgttttaacaacttctttggcgtgttggtagaagaattcaccagctgccgtcagttcaaaacttcttccctttcggtcaaacaatttaacatcaagcatattttcaagctccttgatttgctgggaaatggctgactgggaaatattattttcttcggcggcgcgggtaaaattatgtcgatcaaccaccgcaataaaatacttcatctgttgaaacatttacttatcctctcaatttgatttggaattactaaacaaagcaacgatgctcaatatactttgacccttcacgaattgacaacggtgccaactcttgctgattttactcaataaaatcacgaaccatgatttcgcatatatttttcatttgtctagcacattcagggttagcattgtgagcaaaccgttctttcaattgtctataatcaagcatctattcggctccacagcttttttactactatcttatcagatgtttattctcatcaagcatttcttttttctttaattcataatattcttcttcatctaaaaatgacatcacatggttttcaaagtggtcaaacttgtaggctagataattccaagttcattccgttttgcaagtaggataaagcctgtttaacgagaaccaattactaatattgaaaatatttaattttttgcttgactataaatgaatgatcgtttattatacaaatatgcgatacaaagatgaacacaaaaaagaagctatttatgaagcaacaattctacttctaaataaagaaggtttttcatcaacatcaatgtcgaaaattgctaaacatgccggtgtttcagcttcaacaatttatatttattttaagaataaagatgatatgttgaaaaaattgtatttagatactaagaaaaaaatgagcgccaaaatgtttactgatacaacaaatgatgatgctaagtctagcctagctaaggttattcgtaactatattgattttattttagataatcaggatgcttttctctttttgcaacaattcactaactcgccttatatgactgaattagatgagcgcgaagcaagcacctattttactccaatgtatcaattagttaaaaaaggccaagaggagggaacttttaaagatgtagacgctaatttattatttgcctacattgagccaccaattaccgaattagctaagcgtcatttcaaaggagaaatagattttactgaagaaagaattgatgtattaattaacttagcttggagtgctattaaaaagtagcactttaatttttattattacagtgaacgatcattcgtttattataataaaatcaagtgtttacttaatcgtaaccaaaataagcaacaataaatgaacggagactacaactatgcaaaagaaagtaacttttaaaaacaacgaacacgacatgtctggtatcttattctttccagataattttgatgaaaacaagcaataccctgctttctcaatcgcatctcccgctggtgcagttaaggaacaaattgcaactaattatgactcacggttagcaaagtatggctttattgccctagcatttgatacttcacatcaaggtgaaagcggtggcaaccctcgtcaattagaagctccttatgaacgtgtggaagacataaaatgcgctatcgattatttaacaactttgccatacattgacaataatcgtttaggtcagttaggtatttgtgctggcggtggctactcaatgcatacagctatgaccgaccgaagaattaaagctgttgtagctgtaagtatgagcgatccagcatcatggattcgtgacggttttgacggaaaaacctcagttgaaactcaattagccttacttgaagaagcttctaatcaaagaactcgtgaagctaatggtgctgagccaatttatggaactttcgttccagaagaagtaactgaagggatgcctaatactttagtagaagctcatgaatattatcgtaccccacgtgttcaacatcctcgttcaactaacaaggtatcaatgatgtcaattgataaaatgactgacttctccactttcttgtttgctgatcgctactcaactcaaccaattttgatgattgcgggtagcaacgctgacactttccgtttctcagaagatctgctcaaaaaagcagcttcaactaacaaagaactattcactattgaaggtgctactcacggtgatctatatgataaacccgaatacgttgatcaagcagttgaaaaagctgccgctttcttcaaagaaaatctttaaacatattaatgtgaagcgacttaaaatgaataaacaaatagtctacttttcaaacagtggcaataatgagcgtttagctaaaagaattgctcattattatggggttaatgcaacacctattattccagttaatccgtatcctaataaatatcatgagttaacttcacaggcaaaaatagaacgttttcggcacattaatgttgctattaaaccagttaaacttgaatcaaatatcaatactctaatcttagtatcaccaatttggtatgcagatttgccacgccccgtggtcacttttctgaaacaggttcagagatcttttcaacatgttgtttttgtcagtgacaagttcatgataggttttggtatttgcaagcgaacattaaaaaaatatttatcaaagcaaacaactattgatttaatagcagcaaacagtaataacttttcattagttaaacaatactttcaaaaataaaaaaaactcttaaagattgacgtgtagagttctgtcttctttaagaggctttttttgtgtttgcttcacgataaatactttgaataaggctttctagtaaatcattgccaaatatacaactatccaattatttttttacctgaattgtcaaattaagtgcaacagttaggctatgaggaaatatattgcttgaagagttcttctgctgtgtgatattggaggattcggcgatatttgtggttaatggcatcagttgcctgttgaacataagcttttgacttgtctttcatgctcttgcccttagggaagaattgacgcaaaagaccattgcagttctcattggtgcccctttcccatggagaatatgggtgagcaaagtaaatctggcagcccttgatcttggtcatatccgcaaactcagagccattgtcaaacgtgattgatttaaaccaggcaggatgtctgtcaatctccttttgaagcagcctttggcatgtgcttgcccgatagtcaggaatcttgataactacttcaaagcgtgtggttctttcagtcaaagtcattaaagcaggctgattcttgcgtctgacgcctttaaccagatctccttcccagtgcagcggagcttttctgtcttcaatctctttaggacgctgttcaatggaattgccaagatgcttcttgtgcaaagcgtgaccgccatggctgtgatgacgcttgttcctgcgtcttttgagcttcataggcagatcaatattgcttatgtccagcaagccctgatcaatatagcgatagacagttggtgtgctgggacaagggtagcctggcatagtccttttgaattcaccaacgaactcatcgatgctggtggcatcaaatttagctttaaagcgtctggagagcattctcaaaaagacagcataatgcttcaatggattgcgctgatagcagtttttgcgacgcttctcataataaatctgtgcagtatcagcgtaatagtgctcatacaataaatagctgctgtctctttgcaggacacttccgcgtttgatttcgcgactgattgtcgacttatggcagccgacttcttgagcgataacagtacgggaagttatgccggaatccagcattgcttgaatttgtccacgttgtacgctggttaattgatgatagtgcttagaaatgctagaatttgaattggtcataaagatcttcctttcttgatttttcgtcacttcaagtttaggtcttcatggcctttttgtttaacacttagtgttgcacttcaattttaaatccgggaattatttttttagttaaatttgatgtaatatcagacaataaagaaatttttcctactccacgcatcccgtaaataatcgatatttgataacatcttcaaatgattcaactacattttcgactactttgtttctccctaaatatatttggggaactttaccaaagttagtatcaaatagatttttggcttctatagtttttcctccattttaaatttcttcagattttttgattttattttagatctaattacataataaaaagtaagctattacacttgctaaaatgaaatctaaactatttattacattgcttctcctattatgaaatgcttttaatgtctaattttgcttttttccatatcccagcaggtccaagccagcaataaaataatcagtacaataatagcataagcgaaaatcttggcatattgtttaggcattatattaaatgaaacaaaggttgccggcaaattatataagttcaagaaaattaaaataatcgagctgatccagcctaagaccgaccagcttctcctatttttgaattgccccatcattcttttatcatcagtcataattaataatggaacaatcgaaaatgggacagcaaaagctaagaagacttgtgaattttctaaaagcattttgagagcaaagtgctgctgagaaattgtgtcgttagctgtcataacaacgcaaatgataactggaattacggataatagccgagtaaataatcgtctcgcccaaagtggcatcttcaagtgaatgaagccttccattacaatctgaccagttaaagtccctgtaatagtagaattttgtcctgaagcaagaagtgctatggcaaagagaactgataaaattccagttttagctactgaaatcaaaattggattacttagcattgcagtattgcttaaagcatcataaagtccaaaaaatgaactatctttaaccgctccacttttaaaaacagctgctcccataattagcaaaagcacgttaacaaagaatgctagaataagttgaatatttgaatcccaagtagtaaaacgaactgcatttttgacatcatctggatcatgatgatttatctttcttgtttggcaaattgaagaatgcaaataaaagttatgcggcatcacagtggcaccaataatacctaaactacctgttaacggggaaagcccattaaccacgggatgttgtgcaactagttcgggactcggaaaaacagacaagaagatcttactccaattgggctctgctaacatgacttgataggcaaaaacaaataaaatcaccataatcaaacatgaaatcaaagcctctatttttctgaaaccaacctttgacaataataatagtagaaacacatcaaaaatagtgataaatgttgctataactagtggaattttaaataaaaggtttaaggcaatagctgcaccaataacttccgccacatctgttgccataattgctaattcaattacaatccaaagaataaagctcaatctcttactagttctagcacgaattgcctgcgctaaatccatttgcgtaacaattcctaatttagccgacatatattgcaacagcatggccattaaactggaaattaaaatagtagaaatcagtaaaaagttaaagctctgtccaccattgattgaagcagcccaattgcctgggtccatataacctacagcaactaatgcgccaggtcccgtataagcaaaaagcattctaaagaaattcttagttttaggaaccgcaatcgtactattaatctcagctagcgatttaccattagcatatgaaataaaactatgattttccatcaatggtgctcctatccatggattcctagtgtcattcgagcaatacgcgacatcatatttggattccattgcggataccagaccagtttaatttgacaatcatcgatttccgcaacgctctctgctgccttggtaatttcgttattcagccattcactcaaaggacatcccataatagttagtgtcatcgtaatctggcaaagatgatcatttacctcaatgccataaatcaagcctaagtcaacaatatcaacttgcaattctggatcaattacatcttttaatgcctggtaaacatctttttcttgatcagataaattttctatttctaacattaaccaattgctccttccatttggaagctgatcaatcgattaagctcaacagcgtattccattggcagctgcttggtgaacggttcaacaaatcccataataatcatttcagtggcttttctttctgaaataccgcgactttccaaataatacaattgatcttcagaaattttagaaactgttgcctcatgttccatcgccacatttgagttttcaatcgcattagttgggatggtatctgaagatgattgatcatccataataatcgtgtcacattcaacatgcgccttagaaccgtccgactttttagaaaacttaacacttcctcgataatcagttgagccaccgcctttggcaattgacttagaaacaattgagctagaagtgttaggggcattatgaaacatccctgctccagaatcttgatgaatcccgtggtgtgccactgcaatcgaaagcatggtaccacgtgctccttcaccatttagataaacgctcggatatttcatggtcaccttggcacctaaatttccgtcaacccattccatcgtagcatgcttgccagcaacggctcttttagtttccaaactataaacattatcagaccagttttggatagttgtataacggcaatatgcattgtccaacacatttacttcaaccacagccgcatgaagagagtcagatgaatattgtggtgcagtacatccctcaacataatcaaggtgtgcatcttgatcaacgataatcaaagttctttcgaattgaccagaattttccgcatttaatctaaagtaagcttgaacaggtgcagggacttgaactcccttaggtacataaataaaagtgccacctgaccaaacagcacagtttaaggcagaaaacttatttaaatcaattggaactaatttgccaaaatatttttttaataaatctggatattcctgcaatgcagtatcagtatctgtaaagataatccctaatttatcaaattgctctttcatcttgtgataaaccatctcagattcatactgggcagctgaaccagctaaatattttctttctgcttgtggtacacctaagcgttcaaaagtatccttaatatcctgtggtacatcattccaatcacgatattttttatcagtcattttttgataataaagcatatcatctaagtctaaacccgaaagatcaggaccaaaactaggcattggcattttttcataaatatggaaggcctttaatcgataatctaacatccacttgggctcatgcttttcagccgaaatttgtataattacatcttctgttaaaccatgtcccgttgaaaattttggttttacattatcatgaaagccgaattgataatcttcatctttaactatttcttctgctttagtcattatcctcatcctcgttttctttaccaagtaatgctcgatctaatccccaccaagccaaggtggcacatttaatccgcgccgggaattccataatacttatcaagacttgagcgtcttctagtttttgcatgtcttgttcactacgttttttgccagctgctaagtctgaaaatatcctagaaaaactaatagcctgttcaatattttttccttttaccaattgggtcatcatactagctgaagccttactaatagtgcatccttccccatcaaaagcaatatctttaatttgatcattctcaaccaaaatagttaagtgaatcttatcaccacaagttggattataaacagtcgtttcattagtataattagcaagttgtccaaaattgcgtggagtttgagcatgatcgagaataactgctttatacaaactttttaatttatctaagctcaccgaaaaactcctttgcttcttgaattgaactaaccaattgatcaatatcattttttgtattatagattgagaaactagcacgtacagttgattctgtcttaaggctttccatcaatggttgtgcgcaatgatgccctgctctaacttctacaccatttaaatcaagtgctgttgctaaatcatgtggatgaatttttcttaaattaaaagaaatcacaccagtacgattactgcagtcttttggaccatacaccactaagtcatctatttttgataattcttttaaagcatatgctgttaaactatcctcatgtttttgaattaaagttaaatctaactttcctaaataatctattgcggcacctacgccgatcacgccagaaatattcggagttcctgcttcaaacttttgaggcacaggtgcccaggtagctccttttctagttacatttgtaatcatttcaccaccaaaacgataaggcggcatttgttctaacagagcttttttgccataaagcacacctactccagttggcgcaaacattttatgtcctgaaaatgcataaaagtcagcatctaaatcagtcacattaaccggaaagtgtccgacggcttgagcgccatctactacaacaatcgcgccatttttatgagctaagcttgttaaagccgcaataggattaattgtccccaaaacattgcttacatgagtaatcgctacaattttagtttttgtagtaattttactttttgcatcttccagatctaaacgaccattagcatcaatttcaataaactttaacttagcgttctttcttaaagcaatctgctgccaaggcaaaaaattgctatgatgttccataattgaaacaacaatttcatccccagcttggatattttgctcaccataagttgccgcaactaagttcaaactatctgtgcaaccactagtaaatacaatttcacttgcatttttggcaccaataaagtcagctactttttgacgggcattttcatatttttgtgtagcccttagccctaaagtatgaacaccgcggtgaacattagcgcgatcaaaattagtaaaatgttcaatctgtttttctacaactaacggcatttgactagttgctgcattatcaagatagatcaatttttcatcattaattttttgattaagaattggaaaatctgctttaattttcttaacgtctagtttgtccatcaattaattttttttccaaaatatcaatcatcttttgccgaacttccttattaggaattgcatcaagaacagcccctaagaacccgcgaattaccaatctttgagcttgatcatatggaataccacgactcattaaataattcatttgaatttgatcaacaggacccacactagccgcatgagcagcaataacatcattttcatcaattaaaagcagtgggttggcatctccatgtgcattatcagacatcattaaaactctattttgttgatcagccttagagccatgtgcaccatgaacaatctgaccaattccattaaaaattagttgagaattttcaagtaaaacaccacgttgatttatcaaaccagttgaatgtggcccgcggttggttactcggttgttaataccgactctttgatcaccagttgtaactgcaattgccttagaatccgcataactgccttcgccaattaattctgaatccaaatcgcctaaggtgttgcagtcattcataaaagcaattgcccattcaacatgtgcatcattttcaattcttgcacggcgattaaagtaaagcgttgtatccttatccatttcatcaagggatgaaaattcaacatgactacctggatgtgcaacgatttccaccattaagtttgcggatttaactgctttatcctcattttgaatttcttccaagaatttcacttgactgttatcctccgtaacaatcaataaatgtgaaatatatggatcttgcgtagggttcaaagtaactgtaattggttcggctaaaactgtatttttaggaatataaagaaataagcctgaatttaaatacgcataatgataagccgttaatttatcttcatcatttttaataacggaagctaatgcggatttaactaaatctggatattgctttattgctgtaaaaagatcgcataagatgattcccttatcgttaagaagatcatgattctctttttttataaaaaagtcaggttggttttgccacttaaaatcttctttagcaatcaacggccaatcttgataggaaaaacgctgcattttgggataagaaagtttatgcatcttttcaaaagaactagtccttaaatcagttaaccaggaaggctcgttgttttcctttgatgagacaagtatgttttctttgctcaacatttgacgttttcccccctaattttcatcaactaacttaatatgtaacccaagttcatcgcgaagacctgcatatccttctttttcaagttttttagctaaatctggtccaccgtctttaacaatacgtccatccatcatgacatgaaccacgtcaggcacaatataatcaagcaaacgctggtagtgtgtaatcattaaagcaccaaagttgtcaccgcgcatggcattaactccccgtgatacaactcttaaggcatcaatatctagacctgagtcgatttcatcaagaatgccaaaacttggtttaatcattaacatctgcaaaatttcgttacgtttcttttcaccgccagaaaagccctcattcagataacgctcggtcatggcttccttcatatctagcaaatccagatttttatctaattcattcaaaaaagtcatcactgaaatcggatcatcttttggtcggcgagcattaattgctacccgcaaaaattcagcattagtcacgccaggaacttctgctggatactgcatagctaaaaataatccttttctagcgcgttcatcaactggcatgttaataatgctttcaccgtttagcaaaatattgccttgcgttatgtgatagcgaggattccccatgatagtctcagataaagttgattttcctgttccattaggtcccataattgcatgaatttcacctgtcttgagagttaggttcacgcctttaagaatctttttactcgtttttttatctttgtcttcaacttctacatgtaaatccttgatctctaaagttgccatttaaatcctctttttctacatttggtattgctgcttaactatcagatacaacatatagataatataacgcaaaaaaaattttattttcagtcttgacttttaacctaacatgtttgcgtagtcatgaactggcacttgaagtgttaaatcagaaattggaaatgtaacacaagtgttgacatagttgtattcactatcggctgcacgacgtccaggaaatggaataaatacttttccattaactactcttgaacgacatgcaccacaaacgcctgagcgacatgatgaaggggcaataatacctgctctttccattgccaccagcaaactttcatcacttcttgctggaataacttgtatttgatcacgggttttaactgtcatgttgaaagtcttattctttgcttcctcaggataattcttgaaaaagtatggatttactgaaccggacatttcttgtcttacttgccctggacgaagatctaactttttaatttcttgatttacaaaatgaatcatcgcagctggaccactcatataaatagaataattcttatctgctggagcatatttttcaatgatggcctgattgataaagccatgttcatatccttctacttcttcatcacttaatatgttaacgaccttgaccttatcagttttggcagcaattctatctaattcatcacccaacaaaatatggttgtgcgttctacttccatataaaataatcaaatttgcatcaattgtgccatcagcaattgcaccagccattgagtaaaatggtgtaataccgctgccaccagcaataatggtcttcttgtctcttaatggttcatagaataattgaccagcaggacccgaagcagctacttcagtgccaaccttccaattctcccaaatataaggagttacatacccatttttgactaacttaattgtgagcatatattcgccagaaagcgcctgcttaggtgtgcttgaaatggcataagcacgtgtacaataacttttaccaatatgaagttttaaagaaatatattgacctgcttggaaatatgcaagtttgctggtaccttttgattcatctggtacaaatacaaagctcttagcatcgtcacggtcaataatcttagtgattttcaaatattgcgtttcaggatgaagctcctcttcaagaatgttcatcggatattttttaggcaactctgcatccgaagcattttgaatttcatgttttcgctcattttgaagcttctttaaatcaataattcccttaatctcttcaaatttattcatgatctgctcccatattattaatatcactaacagctatttttgctgcagttaaaccagtagtgtatgaaacattgtaaccatcacacataaatccatgaccaccgcagaaatataaatgtggcagtggatttacaacgttctttaaatccattgatctaccaataatttgatcccatggtgcacaatgatagccataaatttcaccatcaggtgttcccatatagcgagcaaatgttggtggtgcagcaattgcaatctcttctatagaatcactaattttaatacctgttgcctgttcatactcatcaatagcatttttagctattttaactttaagtttttcataatctttgggtttaacattatcccaaacaccatcatcaactaatttagtaatgtagcaaacactaattcctttaggagaagcatttggaatgacagtatttaagcaattcatgatcataaaatcatttttatccatagttttacaattttcatattgttttctagtatcacctgttgaagcaatgaacacactatagtcatttattccaagttctcgacaggatttatttagcccaagatacaccaaaaaggcactggttcctaatttatgtgagtttgcatattttaaagcatactcaggaatacacttttgatccatcatgttgccataaactgcgtgaggagtaattccacaaataacttccttagcaaaaactttttcacctttaatttgcacaccaacagcttgaccattttcaactaagattttttctacagttgtactcagccaaacatcaccaccattatcataaattacttgtgccaatgctgttgacatatcatgacttcttctttgaggaatataggcatcgttttctacataagtagctaacatagtggcaaaatacggaaattcaaattcatcagtgggaatatcaatgtaacaccaatatgctccaagaatttgttgagcttttttaggaagttttaatttgttaagcacatcatcccaactcttagtagcatactcgataaaagctggatatttttttataacttcttttttatcctttccatctgctatttctgctaacgcattcatactttgctcacacagatcaaaaagcttttccatcttttctgaagtacctggtacatatttttccatcgcattaataaaattttctctaccagctggcatcttaacatcaaatccgtctttaccataaataatatagcgataagtatctggtaattcttgcatttttacgttggcacctaaccagtcatacatttttcgtactgcacgcggattatcagcatgaccatattcacataattcatgcaaggctacttcaaactcaaatctgccgcgaataaaactggttgctgctccaccagccagattatgtctttcaatcaatagagtttttttgcccattctagcagaacttgcggcggccattaagccgccattgccagccccaactacgataacatcatatttttcagccattttttaaccctttcgttttcaaatgattacgttttcattataattaatatgaattaaaaaaaggatcaaagtaaagaaaaacaaagttattttatataaactagccgttggcttctggtcctaccagtgcaaaggagaataatatgaaatttcacccaataaatgtacccactgcaacagatttattcttcgttaatcaattaaaaacagcaatcttaacaggaaagtttaacctcggcgataaattacccagtgaaagagttttacaagaacaacttcaagtaagtcgaactgtgatcaattccggattaaaaaaattagcggcattacattttatagaaattcgtcctagatatggggcttttgtagcagattatcgtgtcgatggcgatttgcaaacaatgaacgaaattattaatttctacgggggacattaccgaatttcacttttaaattcgatttttgaaatcaggaaactaattgaaaatgatgttgttcgcttagattgtatagaacaggatgaacaatgcctgcaatcagctatttcaaatatgcaaaatcttgccaaagccaccaattccaaggacgctgcacaagaaatatttgcttatgtacatagtttagccttggcctccaagaattatgtttatcctttgcttatcaataactttaaatcaatctatttaactttaggtgaatggatctgtaatgaagtcgatgttaattctatttctgaagagaatctaaaattaattaaattaatcaaatcaggagataaaaatatagcaattgcttataataacaaactgattaattggagttacgagattttaactaagcaataaaaaaacggtcgatttgcttttcgaccatttttacgcacgttttgcgcgcgattatttatttaaaacatattttgtagatctaccctcaccaattctctcaacataaccttgctttgttagttgtttaagtagatttaaaacttttgttttaccaaaattacttgctcgactaatttgtgtagaagtatttgcaccctcgcgaatggttctaaatactttcttttcatcatcgcttaaatcatcagtaataaattttagaattggtaaaattatttttattgaattttcaaagatctcgaactgtggttgaactaaacttccttgataggaatctttaattctctttattcctgtaccaaattgttcaattaaacccaatctaaaaaagacattagccacaataggatttcttaaaatagaaatttgacctgacagatactcatctttactcaagttatgaggtaatcctcctagagaaactacttctattcgattatcaaacatagaaactttaatttgagcattaatattccaagtcctatgaaccaaggcattagctattgcttcacgaaaagcttcttcaggaatttgacttataacgttacgagtaacaccatgtatttcctcacgctgataatactgccgatatttttgaatagtttggtcatactctttaagaattgattcattctcatagtttgccctatccagcataatattaatattttcaccaaagcgaacgacatcaatcccacgataatgatttttatctgctaataattcacccgcattagtatatccggcattcttctgttctagattaagagtaattagcacatcggatgtcaatttattaattcctagtttttcttttagtgccatttctaaaatattaaacgatagattttgatttgcagctgttaaactgtcataagtcttattttcgccaatcaaaattagttgtgataattctgttctatccacttcaattgaagcactatcatttcttttataagcttttgctttatataaatatggtggattatcgccctgttttaccgtcaacgtgactacattagttttatcatcaatctctaaattataatctggatgtggctggatggaatcatttattttattctctacatttaaacaaaaatcaattggattttttacaccaataattgttccatcatcctttataccaaatttaacttctcctgtaccataatttgcatacgcactaaccgtttttaaaaatgtgtttgtaagattctctttaaattctaaattctttgtttctctcacttaagtcaccttgccaatctattttatctacaattatactctttcgcacacaaaaaaacggtcgattttattttcgaccgtttttacgcacgctttgcgcgattatttatttttcgttcacgataatcaatgacttaattgcttcacgattgctcattgcttcgtatgcttcttggatatgatctaaatcaaaactcttagtaaatacttttcctgggttaatttttccatcaagaacagcttgtaaaagaacttctttatcaggcttagttactgaagcaataccaccgcgaagaccgacatttttccagaataattggtttgacttaggctctgcatgtggtacacctactctaccgattaccgcacctggacgagcaatttgaccagcttgttcaattgcactttcagcacctacacactctaagaatgcatcagcaccagcattttccttagttaaagccagtacatctttaactgcttgatcatcacgacttgaaacaatgtcagttgcaccaaattcttttcctaattgtgcacgatcatcgtggtgggataaaagaatgattttttcagcgcccaacaacttagcaccaataacaccggcaagaccaacggcaccatcaccgataactgcaacagtatcgcccttcttaacttcagcgtttaatgctgcgtggtaaccagttgccataacatctgacaatgtttgaagggatgccaattgatcatcagtataatctcctggcttaccgggaatcttaactaatccagagtttgctggttcatatttcataaattcggcttgatagccaccgttagtacccggcttcaaattcaagcaattgccttcaaaaccattaatacatgcaacacaatgaccatatccatgagtaaatggtacgagaacaaaatcatttggtttaatattagttacctcatcactaacttcttcaacgacaccaattgcctcatggccaattaaagacccactttcacgatcagcaattcctctaaaccaccataagtctgaaccacaaacacttgcacgtataacacgaataattgcttgattttcaccatcgatttttggctttggaacttctcttacttcaactttacctggttctacaaaaactgctgctttcatattatttctccttactatcgtttactttatatacatagtctaatcaaaacagactgtctataaaattactaatattaaatgctactattcaaaaaacgtatagtaatttcatttatgaaaaagaaccgcttgcttaaaacaaacggttctaactattagttacttattaatcttcatcagtattttggtgctcttgactgtcatttttttctttttcataatccttgtcatgatctttttcatcatcttcagtctcagtctttataatcttctgatttttagcatcaatttcaacttcggttttcttacctccatcttcaaattctactttccagattggctgatcatcatccatttctaatgaccattcaacaggttgacctgatacctgagtttgagccaattgagtagcttgctctcgagtcatcatattattaagatctaatgcttgcgcctcatcatctgaatctaatttttcagattcagcttttaaaatattgccattacttgcatcaatcttaactttgtattcattttgtgaatcaaaaccttcaatttcatacacatatgaattcttcttttgctctagttcaatctccttaattgattttgagccatacttttcataaaacttattaactgcatcttcttgagaaagattaatacttgcagtacctgtattactttgattttgttctgtgttattgctttgactctgttgcgtttgagtgccagtagaagcattagcctggttaatcgccaataaacttgcgccacccgctgctaagcctaatgcagctgctgccaatgatacttttttaatgttaaactttttcataattgaattcctcgcttttcgtattaattaactttgtacacttagtttacgaaaaaaggaacctttaaaaaccaagatttaatgtagatcaaatgaaattttcttcattttagagttttttctaattaaattgatttttcaataaatatcctatacgcgtggtgctagttaaatcgttctagacaatatgccatattataagctaaaatagctatttctagccgctgttgaaagcctactggacttcttgctcgattattctcagcgttgtaataactaagcaaagaaaagtcgctttcaatgcttcttctaattgccatcaattgatgatcattatgccttctagctccttgcatatttttacgatatggcgtccaaagcacatatcccatgtgctttagattagtagctagatttttgcttaaataaccttcatctcctaaaagataatggtttgctggatgagcattgatcatcaattctactgtctctttggcatcatgtactgacgctttagtaactgcatagtcaagcagatagccatcatcgcttactattgcgtggaccttgaagccataataatagactttcttggttgctttataaccaatatcagctacgccccgaaagatcttgacacgataattgcgaacaggctggcaaactggcactgggaaactatcaataatcaaaaattctccagctgtctttacttcttgattccaagcctgacggatacaacgaattagaggcaagagcattcgagctcgacggttaaaacgagaatgagataagccaacgaagaatttacagaatcttcgttgagattcaattccaatttcagtttgccaaatgagcatcgctaagatagaactattaggaagcttggtctgatcaacatttttacgatgtttaagtccatcaggcgcataaagcttatacagcgagcgacaaatcacatttaaccgattaaaactaacttgtaaatggtgagaaaaacgcttaagcttgagatagttcaattagatcagactcttttctatttaaattacttacaacttgagtctagtctaattggacttttttattaactaaaacgatttaactagcaccacgcgtatcctataaatttgtctcttttttgacttgttctagagcctttacctgtgcttgatctaagggacgatactcattcatcttattaagtaattcagttaatttgttggtattcattttatcactctcgtgttcattagttgcttttgttaattcattttattatagaaccctcaataatcactaaaaggaatttcaaaaagatttagcgtattttatcacctttggaatttttctaattaaaaaagttattgacaaatttagaaagcggttttattctaagaatgaattaaataatgttcttcgaggcagggtgaaattcccgaccggcggtaaagtccgcaacccgcataagcggttgaatcctttaatggtaccgatagttacagtctagatggaagaagaataattttgctgtgctcttttctattttgatagtaggaactgtacttaaattattttttgaatgttagttagaacctcgaggtaattcttcgaggttctttttttgttctgttaggaagtgaaagaaatggaaaacagtgatgaagcatatatgcaattagctatccaagaagcgaaaaaaggactctatcaaacatggaagaaccccatggttggagctgtcatcgttaaagatggcaatatcttggctacaggtcatcatattcgttatggttattatcatgctgagcgtgatgctatttcaaaactaactccagaacaattatttaattcaaccctatacgttactctagaaccatgcagtcattatggtaagcagccaccctgctctgatttaattgtctctagcaaaattaaacgagtggtaattgcgcaagtagatccacatcaactagtaacgggtaaaggtattgccaagttaaggcaacacaatattcaagtaacggttggcgtattagaagatcaagcaaagaagctaaacaagttttatacttacttctaccaacataatcatccatggataacgttgaaacaggcggtcagcttagattatcgaattaatgaggctaaaaatattcgcactcaaataacaaatgaaactgtttatcagcgagtacatagagagcgcgcaaattatcaagccatcatgattggatcaaatactgccattatcgataatcctagtttactgactactgtcactacggattttccacccattcgaataatagtagatcgacgtggtagattactgaatcatttaaatattaagttattaacggataagttaagtccaacttggatttttactcaaaatacaagcttagctaagactccacataatgaaaatatctcaatttttttgatgaaaaacgcttcaatcaccgaagtcataaaaaaactgaccaatgaagagatccagtcggtttatgttgaaggtggtcctaccctagctaatgccttgctagccgaaggtcaagtaaacaatttaattacttacataagtccaattttacttggtcaaaaaggaaagctaggaatttcacccagctccaaaacaactttacataatttacgtgcttaaaagttggatgataattttagaattgaaggtgaaattaatgtttagtggtctagtacgcggcgacgcacgaattgctgctattgataaaaacgatgaaactattgttatgactgttgcttgccagcccgactttactaaaaacttgcaaattggcgattcaattgcagttaatggaacctgtttaactgttgagcaatacactgatacttcttttgtagtaacgatgatgccacaaacttatcagaaaactacttttaagaatttggatatcaatgcccaattaaatgttgaacgttcactacaggtcggacaaagattagaaggtcatctagttactggacatattgatgatattgccaaagttacggaaatcaggactaacgaaaatgctattgaagtttggtttgcctttcctactcgcttaaaaaatcagattgtagcacaaggtagtattgcaattaatggcgtatcgctaacagtaatggatacacatgataatgttttctcagttggattaattcctcatacacaagatgaaacaaatttaagtaagttaaatgtcggctcagaagtaaatattgagactgatatcttaagtaaatatgtcgctaaaaatttagaaaagagaatttaaaatggacgtaaaaaaaattcaaaatgcaattcaatggatgaaaaatggtggtttagtgattgttgctgatgatgaagatcgtgaatctgaaggtgatatgatcggcttagggtctaaagttactcctgaaaatgttaactttatgaccaaacatgctcgtggcttactttgcacccctgtaagcaaaacaattgcccaacgtttaaatttctaccaaatggaacaaaataatactgatccatatggtacagcttttacaatcagtgttgattacaaaaccaccactactggtatttctgcttatgatcgtgcggcaactatcaaggcaattgctgatcctacttccaagccagaagacttctttagaccaggtcactgttttccattagtcgctaaaggtgatcaaatcaagaatcgtaatggtcacacagaagcttctattgccttagctcatcttgctggcgaaccagaagttgcatatatttgtgaagttatgaaagctgatggccatatggctcgtcgtccccaactgaaagaaattgctaaagaatatcacttaccatttttaacaattgcagaactacaagaatatattaatagtcctgtgagtaaacgctcagagtttgtaaattttcccactaaatatggcaatttcaaaattaaggctttcgccaatgaaaacttagctattattaaaggaaagattgatcctaaaaagccagttttagtacgtcttcattcagaatgccttactggtgatacgtttggctcaatgcgctgcgattgcggtgatcaattacatactgccatgaagcaaatgaataaaaatggtagtggcataattctttatttacgacaagaaggacgtggaattggattaattaacaaattaaaagcttatggtttacaggaccaaggttatgacacttatgaagcaaatgaaattttaggttttaagccagatgaacgaaattatattattgctgccaagattttaaaagatctaggtattagtcatatcaatttgcttactaataatcctgataaaattgatcaactagaaaataacggtattactattgaaaaaagaattcccttggaaattcctgctaataaggtaaatcatgactatttagaaactaaacgagataaattccatcatttattagaagcactatagtgaggaacacagaaatgaatatttatgaaggaaattttaaaaacaataattatcacgttgcaattgtagcatccaagtttaacgaaaccgttacccatcatttagttgacggtgctattgctactttaaagcaatttggagtacttgaagatcagatcgatatctattgggtcccaggtgcttttgaaattggttttactgctaataagcttctcaattcaaataactacgatggtattatgactttaggcgctgtcattaaaggtgagactgatcattacagcatgattattcagaatgttacaaacgcaattatgcagatgaatcttaaagcagaagtcccaataacttttggtattttaaccactgagaatattgatcaagccttgcaacgatccggcttaaaagctggcaatgaaggttcctctactgctcagagtctattagaaatgatttcgctaaataaacaaataaagtaatagagtagagggagattaattctcgcccctctcattgcaccggacgtacggttccgtatccggcgctacgtttgtaatcatctacgagataaatagtattctagcggatcgaccaagcctgggcgatccgctttgcttatgcccaatacttttgggctaagcaaaaagttaacaacatgtccggtactgcgtttataccaacctaatcgcgtattagctactttatgaatatcttcgtcgctaaaattgcactttaatgccttgttaatccgcattaaattagtgtatattcttcttggcagtttccattgtttaatgattactacccgtatcttatggcgcagccattgactgaatttaaatagaaagtatttcataccgccaattttaaagtagttaatccaacctctgaccacttgatttaccttagtaaagactaacgatagaggttgagcagctgctttcctgcgacaaagaagctctctaatcttgttataaagcttggacaggattggcgaaagcggtccgccttgaggcacgccaatcttattgggcttaaccaaaccatcttccatgataccggattttaagaatgaccgaatcaaatggagggtggttttgtcatttactcgttctctaattattgaaattaatttatcatgattgaccgtgtcaaaatatttctcaatatctaaatcaattacccattgatatccatcatcttcatgattgcgtatttaatttctgcttgatgctttctgaaatagctatcaagttcttcaaccattcttttatctactcccggagcacctttattaatcttgactctatgaatcgcttctttaagattgctctgacttagaatctgttcaattaatttcatctcgtaatatctccatttctacttgtaaatttattcagaatcatcccaattgctttcaccatcaaagagttacgttctctttgtgctaggctatcctcttattcggactatctgaacattgcttatagcgggatatgctcttacaaacattaggtccttcgctccagtctcattacaagactttcaacactactatgacctcagctgacttcttgcgactaacctttttcgaccaggcttacgatcgctgatgttaaagcttgctcagcttgcctgtccgcaagatctctcggggtaagacattcatctttgattttccactgcctcctggtttaccgtcttgactttacgtttgtcttttggacttcgacttgtatcgcagccttatccgccatttggcctaaccaggtttctgtacgtaggctcggaaaactcgctagccacttccttcacccatagcgtcaccgctatcggcttgtggttcactacacttggcgacaaatacccgtggtccaaactttcattggattagatgaaatgtcatgcccgacacacaagtaaaaagccaccgaagcactaatacgcttggtgactcaaaggtctaattataagtttcttctactagtagctcatatggctttagcaagtaggtagctcccgtttctttgataggataattttgcacaacaacttttttgcgggaaatatgataattaacttaaacttcccacacgcaaaattgcttgtttcattgtgattctgcgtgttttgacaaatataaaaggcacaagtccttttcattgctataattatattgaccaaaacataatttatttgcatgaaaggcttgtgccaatgtctattttaccatctcctgaccaacaaaatgaacaactattttcaaactcaatcatcagcttcatcaagaagtttcaggtgatcaagctgttgagaaaatgtggcttccgcaaggaaaaaggcattagcctgttcagcttgtttctttacgttttaagcaatgtctttcgtgaccgcagcttatatatgcagctgaaaatggatcattttcaagaaaatttttccaagaactcatattaccgttttatgcgcaacgttcacgtcaattggctccacttcaccacacttctgtctgcgcaaatcattaataaccacttgcgatctttgacttcagaaaaacgggctgattgctttgttgtcgatgattcctacttctctaggaccggcttcaagaaaacagaattagtcgccaaagtttttgaccatgtatcaatgacttacaagaaaggttttcgcatgatgaccctgggctggactgatggagcttctttcatgccaatcaattcagtgctgctgtcttctcagaagctacagaatatgattggcgaaaataaagtttttgatcagtgcaccattgctggccaaagacgtatgcttgcccggactaaaggcacagacgtgatggttaatttaatcgaccaagctatgaaagcaggtcatcaagccaagtacgtgctgtttgacagctggttctcaaatccacatcaaatcgtccagctcaagcaaaggaagctggatgtgattgccatggttaaggtgagctccaaaatcaaatatgaatttgagggagaacgcaaaaacatcaaacagatttatcgcagctgtaaaaagcgatgcggccgttctcgctacctgctgtcaatcccagtcaaagtcggacgccaggacaaagacggtgctaaaatagatgcacggattgtctgcgttagaaaccgtgccaatcgcaaggattggctggcaatcatttgtaccgacatgtcgcttagcgaagatgaaattatccgcaactacggcaagcgttgggatattgaggtttttttcaaaacttgcaaaagttatctaaaactaagtacggaatatcatggcctgtcttacgatgctttgaccgctcatgttgccatagtttttactcgctacatgcttatgtcagttgccaagcgggacgatgaagatgaacgcacgctaggcgagctgttctattgcatgattgatgagctggcggacattacttttagccattccttgcaattgattactgatgcaatgctggccagcgtaaagcaagtctttcatgccagtgaagcacaaatagctgaattcacggctgactttatcaatcgtttaccaaaatacatgcaaaaattgttaaagaaaactagcaaaaataatatagaagcctaaagccaagcaagatcaagagattactggcttatttagtgtgggaagtttaagtaattaattcttcctgaattgtcaaattaagtgcaacagttaggttatgaagagatatattgcttgaagagttcttctgctgtctgatattggaggattcggcgatatttgtggttaatggcattggttgcctgttgaacataagcttttgacttgtctttcatgtgcttgcccgatagtcaggaatcttgataactacttcaaagcgtgtggttctttcagttaaagtcattaaagcaggctgattcttgtgcaaagcgtgaccgccatggctgtgatgacgcttgttcctgcgtcttttgagcttcataggcagatcatgtccaccaagccctgatcaatataacgatagacagtagacgtgctaggacaaggatagcctggcatagtccttttgaattcaccaacgaattcatcaatgctggtggcatcaaatttagctttgaagcgtcttgagaacattcttaaaaagacagcataatgcttcaatgaattgcgctgatagcagtttttgcgacgcttctcataataaatctgtgcagtatcagcgtaatagtgctcatacaacaaatagctgctgtctctttgcaggacgcttccgcgtttgatttcgcgactgattgtcgatttatgacagccaacttcttgagcgatgacagtacgggaagttataccagaatccagcattgcctgaatctgaccacgttgtacgctagttaattgatgatagtgtttagaaatgctagaatttgaattggtcatgaagatcttcctttcttgatttttcgtcaattcaagtttaggtcttcatggcctttttgtttaacacttagtgttgcacttcaattttaaatccaggactcatatttttttcactgtttttatttttttgtcttgatcgaatatagcttgagcaatatttttggtaaaatcattcatgaaggagttcctctttctgtatgttgttttttgttcaaaccaatcatacgagaaaggagctcctttttctaatgtttagggaataaaatttaaggaatcgtccatccttacacaaactattttacagtctctaaaaacagtatctttcaactataattactaaaagatactgtttctttataaaatctttcctaataaaaaactattccatcatagcgaccaatgtaattaatgctgcatcgtaataattcgtatcagtcaaacgattagtaaaaacatactgttgtgaaacaaataaattatcaaattccggtttctttaattgttgcactgcaaaaaagatcggagcactaatactcggtgaagcataattgtttaacgctttaccattcaattgatagccagcagtcacttgtttttgcttgctgaaaaagcgtaacattttagtaataattttctttgctcgtgcatctttgctagtagctaaaaataatggtacgcgacaagcattgccagaataatcaccatcattttttccagctacttcattggctttagctggtctaacaccttttttactaatccaagcaaaatctggaactaagccagaagaatgttgcttgctcaattgatatagttttgtcagcattaccttcttgatcgttaaccattgagaattaccagtcaactgataaaaatcatcaaagtacgtcggtaacacgtcagaggttcgcattaagtaataatacttcgatttcttattagcccaatcaccaacagtcagcgtctgagtagtcgaattataatcataacgtaagatatcagctaataatagcttagcctgctgcaagtacttgggttcgttccagagttttcccgctttaatcaaactttctgcaatgtataaatcgccatcagttgcattagtagaataaacttttttatccacttgcttccatgacattaattcagtttgttgatcatcgatagtcaaccgattagccaggtaaaaccgatataaccgttgaaaatcttcttttttagcccaccccttttcaccagccatagcagaaatcaacatgccatagccttgaccttcagacaagcttgtgcgtggtgcagcttttatccaagtttttccatcactttcttcaaccacataatcttctttccattgacggtacaaattacgatgcaaggtgcggttattactaccacgaacataaaacatgatcgcgataaaaagcccaatagtcagtaagatcaaaattggggtaatcctgtttttgttttttaacatcaatctgtaaacctctttgtttttacccacttcgttgcttcgcgatggaaaagtctgtcagcaattgctgaccaaaccgcattaatcgatataatgataaacagttgtgagtatgtaaaatatgatgccacagcaagccaaagttgtctagttgtaacctgaccaaattgggtactggcagccacactgatttggagtacatagagtagaatcatcaacaaccaattaaaaagtaatacttgactgagcaatagattcccagcagtaaaagtaaatggcatctcaactgttggtacccaaatttttattactgcaaaaatcagattaacaatgaaaaagatatctgataagactactgctgcattaaaccagaaaaagatactggacatataaaaagtttcaagtttgacccgccaattactatggtcaaataaatgccgaaaattgttaattactacttcgtaattacctttagcccaccgcaagcgttgataataatagtcctttagcttctctggttcttgttgaaaggcttcagaattatgtgctagggcaattaatttaccagtgcccaaaatcgtaaatgacaaatcagtatcttcagttaaagcaccagaacgaaaaccacctaactcttttaaaaaagccgtcttaatcacaaagttagtgcccggaatgcgcccaattttgaataattgccaaactccgcagtgctgaattcgatgcgttaccacaatttccaagtttatacagctagtcaaaaagttttgctttgcattccgcgtcttattccgtccaaagctagccacataacgttctggatcttccaatacctttttgatcaagaaatacaaggcattttcttcaggcatcgcatcggcatcataaacgcataagtagtcgccgtggatcatcttaagcgcatcgttcaaaactcctgatttaccaccttcaccagttcttctgatcactttaaactgtcgtttctgatattcagtccgattgccaatggcttcagccaattccgctgttcgatcagtgcaattatcagcaaaaatcaaaatttcgactttatcttctggataattcaagttcagaattgctttgctagttttttgaataacagcttcttcattatgagccggtacaacaatagaaacggtaggataatactcaagtggtgtaattttagcaatttctttactgtgttttaaccaaaaaagcaccccgccccaaagcgtaactaacgaaaatagaatcgataaccaaattgaaatcaaggttagtatctgaaagccttcagtcatccaattctcctttctgactcttcattaatgcctgttcgatattgccataaattttataagcacagaaaaaaatcactaaaaatgcaattgcaaagattacagaaataatcacggacaaataataaaaccagttcattttgctatctttcctttatgtattcagtcacaatttcagtttccaattcacgacgcaaaaaacgaattacagctatcaaatcaggaaatctatcactattgtcgacattaatatggacactcgcatgttttagcgaaacaggaatcggcaactctaactcgcttaattttgtatcaacgatgtgattgaccttttttactaattcattggggatttctggcgaaattatcaaaaaagtcgcatctcccataaagtaaataaactcccccttaagtcgattatttttcaaaactttagtaatctgcttcaggatccgatcatgactattaggatgagcttccgcatactgcttatgttgatcccaactcacaatttgaacgttggaccataaatcgagttcgggatgctgctcaattttatgtagttcattctgataaaatttttccgcactatcgaaagttcttagctttaacctccggtcataaagcgaattataatgccgaatttcgtcattgcgattggtaaaaaagctccagcgaatgatgtgctgtctaatgacggtaactagactagcctcaataggataagcaatcaataataaaaatttttccttaactggcattactacatagcctaacagtaagaatcctgctccaatcgtggtaagaattaaaatcagccaagtaacatcgactcttgaaaagattaagccggttaaaatcgccaaaatcaaaatcattactaggccattaaagacattagctgggtataatcttgctagccataataacaatatcgggaaagtaacgctggcaagataagctaaacctgctaatttaaaatactttctggtcatttttataacatcatcctcaattatgctatttatttacaatttttcattgtaataatttaggaaactgtcaaatcttttgtgtaaatagatctttctcgtaaattgattttttaattatttatttaatcaaagtaggattctaaggtgtcctgaacctgaccaaagcctttatgaattcgattgaaataacggtcattgtagctcattgcctgaatgccaataaaagcatcaagcgactgttcagttggaaactctgcctttggcttagctttgcgcttgatcacattgttaaatgattcaatcatgttagtcgaataaattgaagctctgatctgcttgggatagttataaaagaccagcagatctggttctatgtctttcaagcttctgataacatggctgtaaaccttgccccatttggtatagaagtcatgcaggacagctgtggcttcttctttgtttgtctgttgatgcacctgtttgaattcgttcatgatcttttcacgatcgtcgacgcgtactttagcgcagatattgcgcatgacatgaaccaaacagcgttgaaaatgagctttaggataagtcctggccaaggctgttttcatgccaacaacaccatcagaaagaaaaagctcaacttgctttaagcctcgggatttcatgttttgaagcatatctgtccagacttcaatgttctcgctaggtgcaatgcagtagtcaatgacctccttgtgcccattaggcttgatgccaatggcaatatagactgcttcacgctcaaatgtttctcggcgcaaaggaaggtatgtcgcatccaaatagacgcagaaaaacttgtcgcttagcttgcgtttgtggtaagcctcaacctttggaatcatctgcttggaaatatttgatacctgagctggactgtaatggctgccatacatcttttcaattagatcggctatttccctggtggtcacgcccttggagtaaagcttgataatcatgctttccaagatatccgagtgctgcttgtagtcaggcagcgtgtgctgatgaaattgaccgttgcgatcccggggcacttgcacttcaattgggccaaattgcgtatcaactttgcggaaataagcaccatttctagagttgccagtatcccagccatttctggcatagggatcatagcccagaaaggcagtcaattcagcttctagcaagttattaacagcctgttgtagctctttgcgcaataaatcatttattttgtctggattgaatagagcttgagcaaaatctttggtaaaatcattcatgaaggagttcttctttctgtatgtgtttttttgttcaaaccaatcatacgagaaaggaactcctttttctaatgtttaaagaaataaatttaaggaatcattcatccttacacaaactattttacagtctcatcttttagccaagagtattgtaatagacatataatacagtacaatgattattatcaattacataaaattgatgcaattaaaaattttaatcctgaaatttttccagtttatgacaaaaagcaaaaacaagtttattactttaataaagaagacttcaactatctggacgacacagatgccactttaaagaatctacccaattgggaaaaagactcgtacaagctgtattaagaatttcaaaatgattttgaaggcaagcgttttattgctcttccgtctaaagaagatttaaacgagaatagactaatctttgattactgctgccagcttgaaaataatcaactaggcaatctgttacttgatagttttaatggaagacatgcttttcgaaaattcaaaaatacactttatcaaaatcatcttctagaagactatgaaaaatataaatatcaagccgagaagaaattagcaaccaactggtgcaaagaacataatttaatctaaaaaacactgacaggtcaatttgatctatcagtgttttttcatttatcgatcaatttttggtgcttcaccaatctgtgcttgcatcatccagattctcttttcaatatctgtatggcatgacgttaagatatcatttgagccatagtcgccttcctcgtcacttaccttaatcccttcttcataaaggtgctccaaataacgataaccagcaatgatagtcgcaaatctttctctagttgaaattccccattcaccaggatgagcttcgatcttagtatgatcaagcacttcctgtaagcttgaatatggtgaaccatcaatcgtgatcaatctttcggagatcagatcacgttgttcatccaactcgtccattaccttgtccaagtatgggtgcaatttcaaaaattcaggtccgcgcatataccagtgttgttggcgcacaaccatcattaattgagtggtgtcagccacagcttgatttaaaatttcttttgtttttggatacttcataaatttgcccctttcaccaaaaataacttactttataaaatatatcatagctgatgaaagtgattacagcaaattatttgattatcaaaaaagtgcctagaaaatcagcttcttttcctaaacacttaattatctatttctcttctttttccttgcagtggctcttgcacatacacttttgctcatcggccatcgggcaatgacaaatgccatctttaccagcgcaagggcaaccatcttggcatttcatcccattatgacaaaacttgttttccatttctgtcacctcgatgccatcattatactctaaattttttgttcaatatcactaattttcacaactaaaacagctctaatccactcgaattgcgccttcatttgatcaaaataagttccttcagtgatgaacttgccactaccgtgaatgtgatagccgcggcccataccagttgtgccaggataattgtaagaaccaaccgcgattgtcaaagcgtgctcaggatctgccttcaaatcattttgaattgagtgcatccccgcagccggaatcaaaatcgtgtcatcagccactacattaatatactgtgaccaagtattcaccacactagccggcttaccgttaatcgaaacgattgtagcgggtcccttatcacgtaaaacatctaagaattcttctgtcataattgccataatttttatctcctctcaaatttgtaaatataatataaaggctaatcccgacaaaccatgacattatttaatattttttcataatctgcttcaacttagtgagataattcttcttcaattcactcggctgcaatacctgcacgtcgctgcctagtgaaatcagataatcaaccaaatagtgtaattcttctctattatactttccttggagataaattttccctgcatcatgcacaatattcataatcgggtaagaattatacttcaccttttgctcgccattttcagttaataagcaagaatacggcacttgataataattttcttcatatttttgcaagttggcagttaatggttctttattcattattttagtttcagttggtaaaacacgaactgcctcgaatttatctaaacgcaaaacgtaccattttttcaggtctaaattataggcatgacagaaccaattgcccgcctgaaagaaaatatcgagcagctgcagtttttgttttccctgcacaaactgaaaattttccacttcaattaagctgttatcaatgcatgccttaagcaaagtcgcgaaaaactttacctcatttaaacttggctggctatagaaatgcactaattgtttctgcaacttaacctgctcttgtaaattctgcggtaggcttttaaccagtttcaattcaatttcatcatacgcattgctgtacggcgtctcactgatcccgcgaattgcttgcaatgcaaaaaagatggcgttaatttcttgcgtgttaaaccgaattggcagcagcaatttactattagtcaaatggtagccgccattgcgcccactttcagtataaaaagctagacctaattgctccaaatccgcaatatcgcgcaaggctgtccgctccgaaatagcaaaatgttcttctaattcttttagatgaaaaacttttttgtcactcaaataaattaattcttgattcaatcgttctgattttttcatggatttctgccatcctaaattagatcaatctgacgcaatttccttctcaatctgccttgttcttcgagtaaagcaaacttacgcgacaaagtttctggggtcgtaccaagatacaaagctagatctttcagttttaacggtaaaacaaaactattttgaccaatttcatttgcatacatttgcaaatatttgaataagcgctcttcaactttaggtaaagttaacaattgaatttgcttttgcatagcagaaatttttgtcatacttaactctaataatctaatgctcaattctggctgctgatggatcaacttcaaaaaatcttgtcgccttaataaacatatttcactattatcagttgcttcaacataactatgcgtattaacttgaccaaaaagccagtcttcaccaacataatcccctgtatgtaagacctgtaagacatcctcatgtccagtttcatctaatgtatatagcttggtactgccatgggccacaattactaaattagcacttacagttggatcaataactatctcacccttttgataattttgatgttgcaccaatctttctagttttattttttcatcttgtggcaaagccgtaaataatggtaccagatcaacgcataaatcagccattaaactcattcctttaactaaaagtcatcatcgtcttcttcagtatacaatccttctttgagatcatggcctaaaaaactttgacttactctaatctgttccttaatccaagcaagcaaatcaatcaaattagcagctaactctggccaattttcatcattagctaaggtaatagccttagtaataaacaaaatctgcgtatcaaaatccttcaccaagttgaataattgttgttcacctgcaagatatttgctactgccatcttcttccaacatggtatattcctgaaattgcttgctagtagtcggaatactttccccgttattaactaataaatggtttaaacgcttgaattcttcatgctcatagttcagccactctgttgccttatctgctaagaataggcttgcactgccttgagcaaacaagcttgcttgactgattttcaaagaatgaactaacaaattagaaataatatgaccagtcattgccgctgcagttggctgatgatgatcaagatcactttgttttaattctgcttgatacttttcttgtgcattcatcaattaagctccttttccttgattccttgtacttcataacccatcttttcaattgcagctttaacatctactgctttaactttgtctggatccatcgtaaacttgagcttccccgcattgaacattaccttaatttgatcagttccatccaaattatcaactgctttttcaatcttagtcaaacatgaaggacaagtcatacctgccaatttcatcattactttttccatttatctaaatttccttcctattagtttacatgtttaatgctacatcgatttgttttttagaaacttgatgatgatcaagtttttgcttaaacctaattaatcgcatcccatttaagataacaactaaaatactaaattcatgaataaacatcccactagccatttctacataaccagcaaatagaccaataaatagcagtaatactgttaataaagcaatagcaatattttcgttcatattaagaactgtcttttttgctaaatctattgcataactaactttacgtaaatcatttttgactaaaacaatatctgaaacatcaattgcgacgtctgtcccacttccaatcgcaatagcaacatctgcgttagccaaggcaggactatcattaatcccatcaccaatgaaagcaacgtgataacccttttcctgctcctttttaacaaaagcagccttatctgctggcaacatttcgccataaacttcatcaattggtaattctgcagcaacttgcttagctgttttaaaattatcacctgaaagcataactaattttttaacgcctaatttcttcaagcgagttaaagctattttagcctccgggcgcaactggtctttaataccgaataccgctaattgactttggtctgcattagcaaaaacaacaattgaatttcctaaattgcttaaatgatttatggtatgtaataattcctgattaagatgagtattttcagtaattaaattttgattaccgagataatatttttcaccagaaatagtagcaattaggccctttcctttaacggtttctactttaatcacatctgatgcttgattatctaacttggcaatcgcctgagctaaaggatgattactttgttgttcaatttgagcagcaagcctaattatttcattccgttgcccctttagtattttgatcgcactaacttccggatgacctacagttaaagtacctgttttatcaaaagcaatttcgtcaatcttacgagtttgatccattacttgagatcctttaaaaataatgccattctttgctccattaccaatacctgccactgtcgacaccggcacaccaataatcaaagcaccgggacatcctaataccattactgtgattgctagtttaagatctctagtaattaggccaactataattgcgatcaccaaaacggcaggggtgtaatatttagaaaagcggttaatcaatttttctgcatgagatttggtatcttgagcttcttctaccatttcaatgatcttgccaaaagttgtatcctctccagctgcaatagtctcaatcgtcaatgttccatcttcaagaattgtccctgcataaacctgattgccaatttttttattagccaagctagattcaccattgatactagcctcattcagatagccagatcctgaaacaatttttccatcaactggaatttgatcacctgttttaactaaaatccttgtacccggatcaataaaatcgacgtcttcttccttagtggagccatcatcttgcattaccaaggctgttgttggagccattttggttaaatctgagatagctgagcgtgttttcttcaaggtgacttcctccaaaaaatcgcccagcataaacaaccaagttacaatagctgcctcattaaattcaccaataataaacgcaccaagtactgctaatgaaactaaaacatcaattgagattaatttaaccttgatagatgaaattgccgttaaaacaatcggaattactccaataatccccacaaccagcattaacaactggtatggcagatttaaatgtaacaaccattttgatccctctgccaacaataacaaaattgtatttaaaagcaggatttgctttttatactttatgaaaaagcgttgtactttaatcattttttcccctttcctttacctgacgattattatcataaaagcaaaagaactctaaaaacttgatgatgatcaagaaaatcaaagatttataatttaatttctgtcaatatttgtcagtatttgcgactataataatcttcagagaaataatgagcaagaaaggtgacaatcatggttgatattttaactaagcaaactactaatcaagaattcttagactttgcggtcgagcaagttcacaacgccgatatcgttactactcacgcaggcgagcctagcgcccaagtttgcgacttattattgaacaaaaacggtaaattatatatcgcaacttcaagtcaaaatccattttttaaggatttgattgctcagccaaaagttatcgtggacggttacaaggggggacggaacgatggactattgcggtttttcaattcgtggtacaatcaaaaatgttgatcacttatatcttgatgaaattttcgccaagaatccttatctcaatgaaatttatgccgatgacctagaaggtgctaaaaaagatttacgtgtccttgaaatcacgccaattaccgcgggctacttggattaccgtactaagccagtcttcatgcgcaacttcaaattctaaacaaaaaaatcagagctatcatttcgacggctctgattttttgttttttcaattaaaagaagattttactcatgatgatcataaagaccaacaaacaagttgagctgattgcggcagcaccgaacacggcaccaccgcgcttgaagatcaccttgaagttaactgagattcccaaggcagccattgccatccctaaaaagacatatgcggcttgcactaagagatccagtgtttgagcagataatggcaaaaatgtcccgataatactcgttaagataaagccacccaagaaccaaggaattggcaatttctttggcgccttggtatgttctgcctcactttcagtcaccaaacgcttttggtaccagtaacccacgattaaagcaaccggtgctaataacaacacacgtgacaacttcataattaaggagctatccaagctgatctcaccaaacgcactaccagcggcaaccgcgtgagcaatttcatgtaaagaaccacctgcgactacaccatattgtgtgtcggttaagccaagcagcggcttaagcatgatctcaagtaatgtgaacatcgtccccatcacacagacaacggccactgccaaaacttcattttctctttttctttcttcatcagtggtctcaatctgtggtgacacacccatgacggcggccgcaccgcagacaccacaaccacatgctgaaagaatagcaagctcatcttcggcgccaaatttgcgactcagccaataagtaagcacgatcgtcccactaactgcaaacgctgcaactaagattgtcttcacaccagcatcagccaacttggtcaaattaagccgaaagcccaacaaaataatccctaatctcaaaaacttgttggagataaaacccataccacttttagcttcagtctgaacgctctgcggcgtcacttgcaatgcaatccctaacagcaatgcaattaccaaagctccaattaagtttacatatggcaacttagtcaagaaaattcctgctacagaacaaaataaagtcattcctgcagctaaccaaaatgatttagttttaattatgtttgtcaacaaaaatccctccgtatgtgatcaatttaatttgacaaacacaactcccttaatgatgatgtctataagtttactcttgttttctatctttgacaaggtatattgttaattatttcacatttattcaaaaataaaaaaagaccaagtatctgcttgatcttccacatattgacaaaaaggagtgtacaggatttgaacctgcgcgccaaggaaaacttggttcgccggatttcgagtccggtgcattaccactctgccaacactccgtaacaaaaatattataacctattatttgaataatgccaaaatatctttattattttgactgtctttttgtctccgtaactgctacactttgcagtagtacatcgtactagtaaaagatatagaaaagagaataaattatgtgtacttctattatttttagtccacaagatcactatttcggccgtaacctcgaccttgaagttacctttggccaacaagtagttgttactccacgcaattacgtcttcaacttccgcaagatgccagagatgaagcaacactacgctatggtcggaattgcgcttgacgctggcgattacccactttactttgacgcagctaatgaaaaaggtttaggcatggccgggcttaactaccctgacaatgctacttactacgatgtagttgacggtaaggacaacattgcttcatttgaattcatcccttggattttggggcaatgtgaaactgttgctgatgctaaaaagttgcttgaaaagatcaacatcgttgacatcaacttctccgacaagatgcaagcatccccacttcactggttaatcgctgataagaccggtgtttcaatcgtggttgaaactgacaaagacgggatgcatgtttacgacaacccagtcggctgtttgactaacaacccacaattctcaagtcaattattcaacttaaacaactacgccgacgtttcaccagcaatgcctaagaacaacttctcttctaaggtagcaatgaacggctacagccgcggccttggttcacgcaacttgccagggggtatggactcagaatcacgctttgttcgtgtagccttcaacaagttcaacgctcctgttggcaagactgaagaagaaaacgttgataattacttccacattttgcattcagttgaacaacaaaaaggccttgaccaagttggtcctgacgcattcgaatacaccatctattctgatggtaccaacctcgacaagggtatcttctactacaccacttacaccaacaagcaaattaacgttgtcgacatgaacaaggaagacttagattctgctaagttaatcacctacgacatgttgactaagccaacttttaaccaccaaaactaaataattaagaaataatgttaattttgtctaaagattagcattatttttatttttacggttaaaatagatgtacttattaaagtaattggggattttcttattaatgaataattattttgtgttgctgctttcggcggtaattttactctggcttatttttaacatcaaaaattcacgtcgttttaacctttttgaccattggttacaccaccagttggtgaaacgtcacgacggttatagttggcaagtcatcgccttcatcaatgatcctaagttaatggtagtttgggatgtgctattagcaggattattactaaatgaagagcgtaatttgactgccctttgggtgttagggaccttgggctttgcggatatttctggtattattttgaagaaattaatccgtcgccagcggccactaatgcattccgacaaggaagatggctacagctttcctagcggccacgtacttggtgcgacaaccatggggttaattgttttgcaactatttgccaaggatttaggtaccggcttcgtcattgtggtcgttgcactatgggccatggtgatcttctctcgtttgagtttgaaggcacactacccctctgatgtattaggagcaaccagtttagccatcgtttgcttcagcatttcacaacagctatttttagccatttaaaaagatcacgtttatcgcgtgatctttattttttattcgtgaaagccaaccataatgccgccttcttcggcgtagaaactacacaggccatgcatcggtcgaatcgttatttgcgcatcaggatattcggctaaaatcttttccttaattgtggcagcgtctttttcattttcgcaatgatcgattatcacttctccaccgtgataattatcttccttcatgtacttgataatttcacggatggcctttttcattccacgagccttagtaagtggctcaagttttccttctttacttgctgttccgatcaagttgattttgagcaaacctgcgattttggctacagctggtgaaacacgaccgtttaaagataaattatgtagtgattgcaaaacaaaaagcaaatgagtctgcattctaaacttagcaattgcttcttctagatctacaaagcgcatttcaccttgcagcattttctcaataccatggactatgattgctagctcaggtcccgcacttcttgaatcaactactataattttactcaagggatttttttcctcatacattgcttttgcctgaagggctgaagaaaaagtgccactcatcccgctggtcattgtgacgataatcgctttttctgttccttcaagtgcgtcaagccatgcttgaatacttggacaagttgttttgcctgccacattattttggtttatattggacaaaaattccttcatattcaaatcttgattatcaaggtagtccttaccaccaaaagaaattgtcagaggcactacttccaaattacgcgccggatcattattcatattggcacttgagtcaacaattaatttaatattttccattttagattccttattttttgtatttattttaatacatatattatagtcctttgatatagagttttttaggctgctttactaatttttaaaatgtaaaccgctttcatatgtttacaccgtcacaaagttaggctaaaatttgagatgtaaagcggagcaaaaattgttccgtatggtatgaaaaacataccataatttttgaggaggtttattaatgctcaaatcagttattgaaaatgtacacgcacttgaaattttcgactcacgtggtaacccaactgttgaagttcacgttactctttcaaacggtgtcgtaggtaaggctgaagttccatcaggtgcttcaactggtgaaaacgaagctgttgaattacgtgacggtggttcacgtcttggtggtaagggtgtttcaaaggctgttaacaacgttaacactgaaattaacgatgctcttaagggtatggacccatacaaccaaccaaagattgacaagaccatgattgacttagacggtactccaaacaagggtcgtcttggtgccaacgctatcttaggtgtatctatggctgttgcagttgcagctgctaacgatgctcaccttccattgtacagataccttggcggtactgatcttgaaatgccacaaactttccacaacgttatcaacggtggtgaacacgctgacaacggtatcgacattcaagaattcatgatcactccagttgctaagacttcattccgtgacggtttcgaaaagatcgttaacgtataccacaccttgaagaaggttcttgaagacatgggttacgaaactggtttaggtgacgaaggtggtttcgctcctaacatgaagaactcagaagaagctttgaaggctcttcacgaatcaatcatcaaggctggttacaagccaggtgaagatatcgctattgcatgtgactgtgctgcttcatacttctacaacaaggatgatcacaagtaccaccttgaaggtaaggttcttactgatgaagaattagcagattactacgacaagcttttggacgaattcccagaattaatttctatggaagacccatacgacgaaaacgatgttgacggtatggttaagttcactaagagccacaaggaccgtatccaaatcgttcttgacgacttcatttgtactaaccctgcacttttgactaaggctatcaaggaaggtgctggtaatgcttcacttatcaagttgaaccaaatcggtactgttactgaaacccttgaaactatccgtctttcacgtaagaacggttacaacactatgatttctcaccgttcaggtgaaactggtgacaccttcatcgctgacttagctgttgctgttaacggtggtcaacttaagaccggtgctccagctcgttcagaacgtgttgaaaagtacaaccgcttacttgaaatcgaagaagaacttggcgatggtgaacgtcttgccttcttcccagacgatgttgatcacgattaatttcgagttaaccgagtacaatttcaaaaaaagcatgagaattaattttcccatgcttttttgcttactcatttaatctttattttactaattgactaaagattttattcagagatgtatctttaactactttaactacaattgggttgccattcctagactgatcaagcaagataaccggcttatcagatttaaggcagaataagtaagtattgtgccaagatttaaagtcatcattagcaattgccagcacattataatcatattttgccttgcccgttggactgtagcctatcttaattgactttttattcaaaacaaaccgattagttgctagcactccaggataagttgcaccctttttggtctttaaattctttttcccatcataaaactgataggtctgaccggactttttaccccagttattgactgcagtctttaacttggctgtcttagctgtattccaaattacaacagccgactttttagtcctatttttcttattctctttgattttctttttcgagtcttttttaggcttaatcttcttggaacttgaagattgtaccttggcagatttagccttttttacgtttactgttttcttattttgttttacttcaccaatcgtcactgcatctttaccaaaatgtacttgactacaacccgtcaaagtcacagctaaagtgactgcagcaatacctacaaaaatttttctattcataaatagctccatttgttatttcttatgtctattatcacacaaaacctccctctttaaccgctgtttaaataaaaaaagagctaattttgatacattccctgtcaagtagacagtagaattacataaagcttttattcctcagttgattaataatcagctgaggattttttggcttctcttattttcttttcgtgtattttttgccagtatttctcaattcgatgatttggtgcaatagggcaattcttaatattgcctttcatcgcttctttgcgcatttcaccagcagttaaaccgttaaaacgtttctgtggatcttcattaatgtagtaatctattgtcttacaaatagaatcattaagttcatcataactggccacttgaggatgaagaataactcgcatttctttgataatgccttgccagccttccattggaccattatcaatacagcagccaacacgagacattgattgcgtcatgccttggtcttttaattggttttggaaaggtgcgcgagtaaattgaaaaccacgatcactatggaaaagcggatgagcattagggtatgctttaacagcctgcttataggctgcttgaactaaagcagtatcgtttcgtttactaattgcgtagccaacaggatagcgatcatatagatcaaacacagtacatagatatgccttaggcaggttagcagcaacgacttcagtgatatctgtacaccatttttcattaggtctagatgcattaaagtctctttttaacttgttttcggccgttttctcaggcgttgtatgcttgaactttagcttctggtatctaggcttttgtgatctaatgccattgatacacatcaagcggtaaacagttttatgataaaccggcttttcatcagacatctgtcgattaactgccatggtcatcttttccgtcccaaacagactgttgttagacttggttatttcaatgatctttgcttcaatctttttgtctcgttcttcacgcttactcggcttgcgcttaggatcaaagtatttgtaataagctgagcgtgctattttagcccatttgcacattaaatcaatcttccaattgtacttttgatggcagtcatggattaactgatatgtttcttgtttccagcgtctttttattgcggcttgtctgtatcttggttgtccggcaagcacatcctttctaactgatctaatttttttaggaattcgttcttagtttgttcttctttgagctgacgctctaattccttaatttttcgattagccagttctaactcagttagctcttctggcttcttatgtctgcctcgtttatctgttaatcctgtttcaccattagctagatatttgtgtgtccagctgtaaacctgctggtaagaacaatcaaatttgacagctgtttgagtgtaattcttgtcgtgattaagacagtattgaacaatctgaattctttcttgctgggtagtttttcttcttgctttagtcatatagacctccggatggggatcatagtcccgattttctatatgactattatacttggaaacccattctgatactgttccattgcttctaatgccatatttattagctaaagaaggtaacgacattttgccagctaaatattcttgaacaaccttttctttaaatgccttagagtaatgattattgtattgagcattacttagaagggtatcacgattgctttgatattgatgaacccatcttcttacttgcatcgctccacttttacttggcatcttaagccgtttagctatttcaacgctgctcctattaccattcaagtattgttcaactgcccatatcttttgatcgaatgaatatttactttttctggacataaaaaatcccacctccatggataattgaatactttatgtatttcaatcgtccactttagtgggattgtatcattttcatattagctctttttaattaataaattgtaacttgataacgatttgaacgatccgttgcttccggtttttctccaatcttgccaaccggcacgatgacactcgtctgaaaggcaggatcaatccccagctccttctgcaattcgctgtcatcatttaatctagctgcaccgcccattacataaactgagccaagacctaagtctgtcgcctcaagcataatgttctctgcaccacaggatgcatcgcgctcgccaaacatgctgtcttttttagtattaattataaataatgcgtgttatcatgccccagtattaattataaataatactggggcattataacacgcattatcggtcttcgtctcaatcttgtcgcgcaatgcttcatctttaacaaccaccaagctcattacatctgtctgatgcattccacaaggagtcgtttgaaaagcagcaattagactcttaatctcatcgtctgaaatagattcactgctaaagtttctaacagctctccgatttgtaaaaattgaattaaccatatatgcctccgtttttactttacatgcctattttagcattcaagattttattgacaacgttttcatgaataattatgatggtggtaaaaagtatagatttttatgaggtgaatacataatgaatttagcagcaattgatattggtggtacaacgattaaactcgcaacttggaaagatggcaaattacaaaataaccatgcagttgatactcctaaggatttaaatggcttttatgatgttttaacagcagaaattaataaaatcaaacaagatactaaaatcgaaggagtagccatctcctcacccggtgccgttgatcaaaagactggaatcattggtggctcatctgccttgccttacatccataattttaagattgttgacgaattagaaaaaagatttgaattacctgtatctatcgaaaatgatgctaactctgctgccttaggtgaattagctgctggtgctggaaaaggttgcaattcaatggtcttttttgttatcggtaccggaattggtggagccttaattattaatcaaaaagtttggcatggggctcatctttttggcggtgaatttggctacatgctaatgggaacacatactttaagcgaacttgcttctccggttacaatggctaaccattataatgaaagaaccggtaaaaatcttgatggtaaaaccgtttttgccttagctgatcaagatgatcccgttgcaagcgatgtccgctctactctaattcattccctggcagttgccatctacaatattcaacacagctttgatcctgaaaaaatagttctaggtggtggcatttctaacaaccctgagttaattcctctcctaaacaaagaaattgatcaaattgaagcaaattcagacttacataccttaaagcctgtcattgccctctgttcactaaaaagcgatgccaacttgcgtggagcagttgctaatttcgagcaaaagcatcaaaattaatcaaactataattgttattttatctaaaataatctttctacaagcctatataaatgggcttttttctttatgtaaattaaaagtatagatttttaactaattagatctttattttcattattaatctgatatacttatttatgtagataaataaaagtgcttacagagggagaggagaaatagatgtctgaaaagcgcaaattgccatccacctttttctggggcaactcagtttcaagtatgcaaactgaaggtgcttggaatgaagatggcaaaggtctctccgtttatgatgttcgccctgctactgacaaaacaactgattggcatgtagcaattgatgaatatcatagatacgatgaagacctcgacttaatgaaagatatgcacctgaacatgtatcgaattcaaatttcatggtcacgtgtatgtcctgatggcgacggcgacttcaacgaaaaaggtatcgacttttatgatcgtttaatcaatgcgatgcttaaacgtggcattgaaccaatgatttgtctttaccatttcgacatgccactgaatttagctaagaaatacaatggctttatgtcacggcatgtagttgacgcgttcgttcgctttggtaaaaagatgattgatcacttcggtgaccgggtaaagtattggatcgttttcaatgaacataacctttacttccaagatgaagttttcaatatttcaggttatgaacatggtgaaaagagcttagatgatatgtacaccatcttccaccatacgatgatgtgtcacattcaattagctaattacatccacgaaaattattctgatgtaaaaattggcggtatgcttgcctaccaacaaatttatccagctaccagcaaacctaaagatatttggtctgccaaacaagttcaagaatttttaaacttcaatatttatgatgctgatactggtcgtggttactcaccagaagtaatgcaatatgccaagaaccatcacatcaacatggatatcactgatgaagacaaagaaattatgaaaaaagctaaagctgacttccttgccttttcatattactcatcatgggtattatcaagtgacaaaattcctgccggtgaggctcctaaccgctaccttaaccaaggcggcgtagaagccaaatacgtaaaaactaacgattggggctgggcaatcgatccacttggcttcagaaatgcaatcactaccatgtataactactaccgtattcctattttccctattgaaaatggtattggtcttaaagaaacatgggatggcaagaatatgatcgaagatgatgagagaattgcatatcatcgcgatcacattaaagccatgaaggatgccatttttgatgatggtgctaaggttcttggctatctcggctggggcttaatcgatattccaagttctcatgctgatatggaaaagcgctacggtgctatttacgtcaacagatcaaatcatgacttaaaagacttaaaacgtgtacctaagaaatcattttactggttccaaaaggtacttagtgataatggagatgaattataatggctgatcaaaaacaatctggatttggcttatgggttaaccaacacataatgccaccaatcatgaaattcgttaacactaaagcaattaccgctctgcaaaatggtatggtttactcactgccattcattattatcggttctattttcctgattttaggaaatattcctattaagtccgttgcagatgcaattaatgcttctggttggggtgctatttttgcacaagccaacaacaccactttccaaatgatgggtttgtgggctgctattggtattgcttatgtttatgttaaaaacgaaaattacgaacctttagcaccaggtcttacttcagcagctgctttcttaatgctacaaaacttaagcattgataatccattaaaggctgctttaacttcaggtcttactgatggttcaatgacaggtaaagtagtaacagaaaacattgataaattgcctcatgctttacaatcattcttagaatcacctgttactggtgtaattaacactaagtggcttggtggtgacggtatgatcgctgcaattatcgttggtttacttgttggttggatctacacaatgattatgaaggcaggttggactattaagatgccagctcaagttccacctgcagtatctaaccaatttactgctatgattccttcaggtgttatccttacaggttcaatgttgatttatgctgcatttaatgcatttgcacacactgacttcttaaactggatctacaatactttacaaattcctcttcaaggtatttcagactcattcggtggtgctatcgctattggattccttgtaccattcttctggttcttcggtgtccacggtggtttgatcatgggatcacttgttgctccaatgcttcaagccaacactgctgacaacgctagattattcgctgaaggcaaacttactattgctcaaggtgctcacgttgttactaatgaattctacaacaacttcattaacttaactggttctggtattactattggtttaattatcttcactttagttgctgctaaatcagttcaattgaagtcaattggtaagttagaattagtacctggtatcttcaacattaacgaaccattcctcttcggtttgccaatcgttatgaacccaatgcttgctgtacctttcttcttaactccattagtagttgctgcttcaacttacttggttatcaaaactggtattgttccaccacttaatggtgttgccgctccatggactacaccagctgttatctctggtttcttaattggtggctggaagatggccatctggcaggcatgtacgttacttatttcaacagctatttactggccatttgctagaaaatacgataaggtattgctcgctaaagaaatgaaagaagctaaacaagaagcaaataagtaaaaatatgctaatcatatgaaattaaatatagttttagaaagagagatgccattaatgcttgtaaaatagtaaaaatgacgtctcttttttgataaagtatagacttttgttttaaaatagaagtataaaagtaaagaagatgaaaaaacatggcaaaggcaaaatatttagaggtcgcaagtgaattaaaaaaacgtattgaaaatggtgtttacagtaagcaagagcccttacctgatcaagaggcattcgctaaagaatttgacgttagtcgtctgactgtaaaaaaggctttcgatggtttggagcgacaaggactagtttataaacaatctggcttaggaacatttgtcgcaggcgaagttccaattaaatctgatattgattctcccgtcaatgcttttactggtttaagaaacttactaggaaaaaacgaagttacaagtaaggtgctacacttctctgttgagtttcccgatgagcaaatacaaaagaacctcgatctaaagcgaaatgaaccagtctataacattgttcgacttagaatctatgatgatcaaccctacattattgagcatacttatatgccaattaagctggttcccgaattagatgagaagattctacatgcatcaatctataattacatccatcaaaaattgcatttaaagtttggtcatgcttatcgaaaaattcgtgctgctaaacccaacgaatacgataaaaaattcttagatgctaaagatgatgacccaatgcttgagctagaacagattatttggcttactaatggccaacctgtcgaatattctgtcagtaagaatcgttacgatacccgcgattacgttttattagataataaccgattttaggaggtattttatggcattctcaaaaaatttcacttggggtggcgctactgcagctaaccaatatgaaggtggttatgatgaaggcggcaagggtttaaatgctgttgacgttttaactaatggctcagcaactgaaccgcgtaaggtaacttggaaaaagcctaatggtgaaactggagctacgcctctagtttgggggcaagaatttagtctacctgaaggtgctgttccaactattttagacggttactactaccctagccaccaaggaacggacttttatcaccactatcaagaagatattaaattaatggccgacatgggctttgatgttttcaggctatcaatgaactggtccagaattttgccaaatggtgatgacgaacaacctaatgaagacggattagccttttacgataaagtatttgatgaatgtgctaagtatggcattgaaccactggtaactttatcccactatgagacacctctttctttaattacccgctacggtggctggaaagatcgccatttaatcgatgctttcgttcactactctgatatcgtgatgaagcactacaaaggcaaagttagatattggcttacttttaacgaaatcaacgccatggacatggctccttatatgggtggcggtttaatcgatggtagcgaacaaaatcgtgctcaaggtgctcacaatcaattcgtagctagcgctaaggtagttaaattagcccatgaaattgaccccaacaaccgtgttggccaaatgctagcttattctgcctactacccttacacttgtgatcctgctgatcaacttaaagtgatggaagccaagcaagagatgctcttctacagtgatgttcaaactggcggccgctaccctaactatcgtcttaagaaatatgaacgtgatgggattaagctgaatgatacaccagaagattatgaattaatcgctaaatatccagcagatttcttaagtttttcttgctatacttcaaacgttttaaccactcatgaagctgatgctaaagctaacggtaatgtttctgctggtggtgtagttaacccatatcttgagagtaatgcttggggctgggcaactgatccagatgttttacgaatcggcctaaatgagctctgggatcgttaccacaagcctctatgggtagtagaaaatggtttaggttctgctgacacccttgaaaaagatggatcaattcatgataactatcgtattgattacttacgagaccagatcaaatcaatgcgggatgctgtcacaattgatggtgtcgatttgatgggatacactacctggtcagcaatcgatcttgtctcaaatgggactggtgagatgaagaaacgctatggttttgtctatattgatcgtgatgaccgtggcaatggctcactcaagcgttatcctaaagattcattctactggtataaaaaagttatcacctcaaatggtgaggatttagactaaaacttttatttataaatagagcctagctaaaaagtgctagactctatttttctaaaaagatatgatgaaagcataagtaatatagatgagagaaggaaaagtatgattacaattactaaacaattcaacttcaaggctaaggacttctttgattaccttgaagaacaattaattcctgctattaaaaaagctcgtggtaatgacatgccggtaacgcttgctaaaggtactaaatacgaggtggatggtgcccaagtagaattaaccgattacgaaagaaacaaggtctatggggctcattttaagacagatcgaatggaattagtgattaaatatgtcactgaggataacgatcaaggcgtaaaaatcaccttttctgaagacatgcttagctttgaccgcgagaaacacggcaaactccaaactatgttttacaatttccaattaaagatgggcgcaaagaaagaattaagacgaatgggtgacaatgttttagctaatattgcagcttaaaatcgccatctcagcagcaaaaagaccataactacttctaattgtgttgtagttatggtcttttttttgttcaaattaacaatcttatctatatcaaaattaatctattagttcttagtagcgtcagcctgttccttcttcaataagacattgtcatagtgcttgatgaatgggaaccaaactaagaaagcaacaagtgcacaaacaattgaaagcacggcaccttgccagctagtagttgcaagataaccactcaaacccactggagttggccatggttgttgcacaataatcttaggtactaaatgtgaagttactgcgatgtaacccaccaagccagaagcaagtggagcacaaatgaatggcacaagcaagttaatgttataaacgattggcaaaccgaataacaatggttcattaatattaaaaatggcaggaaccaattcaaccttaccaatttctttcaattgagctgaacgagaaccaaaggctaacaagattgccatccctaaagtagcacctgaaccaccaataattacaaaggagttcatcggatcacctgcaaagaagtgattagcaccatttacattagcagccatattagctaaaacaattggagtatagaatgagctcatgatagtagcaccatgaattccgaaccaccataagaagtgaatcaagaaaatgataatcaaaaagccccaccaagtatcagcaattgcactgatgaatgagaatggaatgtaaagaacttggaaaatatcagttcctaaagttaccaaaattagttcaatcaatgcaactacaacagcaatacaaaagcctgggatcaaagcgctaaatgagttagaaacaccagatggaactgatgcaggcatttttattctccagttgtgcttaacagtgtaacggtagatctgaactgtaagccatgcaattactaatccagtgaagataccaacggcagcaattctggtaataccatttgttgaggcttcataaccgcctgccaccattttagtcttagtaaatgtagtaataaattgaacagcaccatttttccaaataagttccagaacagtaatgaagaatgccattaagaacatcatcaaaccgttcatcggtaccaaatcaattttctcttctcttcgataaatatccgtgtatgaataagcaaaagtacctgcaaatactaatgccaagatacccatagtcgagttgtaaactacttggaataagccactaaagcggcctaaagtattcgcataaaatgcggcaaatcctggaattggaaatgcttgaggcagcacattcaaaattaagaaaactgccccgataattgaaaatgaaataacgctataaccagcgtccataatagctctaacaaaacgtgaacctgcaaatttacctgcttttgcagctagcgcatctttaaaagagccagattttgaatcagccatatttctttcccccaatattctgaaacatcattaaatctgaacagccttattatagcgaaagcgttttctaatgtaaacgtttttattgatatacgatatattttggttttttaaaatgtatatttttgaaattacttctaataaaaaaagttcatgtaactttacatgaactattgttggtgcttcttaaaagtctctatcaccttgtgataacgatcttgatcattcataatttgatgaattcggtattcgctccaaacacacaataaaatgccagctaaaaacaaagttgtcataaagaacataatactttgattttcgatgaatgggaataaatacttacccaatggcaaaaacgtcaatattataaaaagcaaatttaaagctgcttgtacttcaagataaactctgctaattgggacctctcgttttcgattatgcattttagttaactgctcaatcgaagcaatcccactataaattgtcataattgccgaaacaataatgccaagaacactatgataatttacatcaataattagccacatcaagttggtaaaaaagaagatagtaataatatatctaattaacttaaacttcccacactaaataagccagtaatctcttgatcttgcttggctttaggcttctatattatttttgctagttttctttaacaatttttgcatgtatttgggtaaacgattgataaagtcagccgtgaattcagctatttgtgcttcactggcatgaaagacttgctttacgctggccagcattgcatcagtaatcaattgcaaggaatggctaaaagtaatgtccgccagctcatcaatcatgcaatagaacagctcgcctagcgtgcgttcatcttcatcgtcccgcttggcaactgacataagcatgtagcgagtaaaaactatggcaacatgagcggtcaaagcatcgtaagacaggccatgatattccgtacttagttttagataacttttgcaagttttgaaaaaaaactcaatatcccaacgcttgccgtagttgcggataatttcatcttcgctaagcgacatgtcggtacaaatgattgccagccaatccttgcgattggcacggtttctaacgcagacaatccgtgcatctattttagcaccgtctttgtcctggcgtccgactttgactgggattgacagcaggtagcgagaacggccgcatcgctttttacagctgcgataaatctgtttgatgtttttgcgttctccctcaaattcatatttgattttggagctaaccttaaccatggcaatcacatccagcttcctttgcttgagctggacgatttgatgtggatttgagaaccagctgtcaaacagcacgtacttggcttgatgacctgctttcatagcttggtcgattaaattaaccatcacgtctgtgcctttagtccgggcaagcatacgtctttggccagcaatggtgcactgatcaaaaactttattttcgccaatcatattctgtagcttctgagaagacagcagcactgaattgattggcatgaaagaagctccatcagtccagcccagggtcatcatgcgaaaacctttcttgtaagtcattgatacatggtcaaaaactttggcgactaattctgttttcttgaagccggtcctagagaagtaggaatcatcgacaacaaagcaatcagcccgtttttctgaagtcaaagatcgcaagtggttattaatgatttgcgcagacagaagtgtggtgaagtggagccaattgacgtgaacgttgcgcataaaacggtaatatgagttcttggaaaaattttcttgaaaatgatccattttcagctgcatatataagctgcggtcacgaaagacattgcttaaaacgtaaagaaacaagctgaacaggctaatgcctttttccttgcggaagccacattttctcaacagcttgatcacctgaaacttcttgatgaagctgatgattgagtttgaaaatagttgttcattttgttggtcaggagatggtaaaatagacattggcacaagcctttcatgcaaataaattatgttttggtcaatataattatagcaatgaaaaggacttgtgccttttatatttgtcaaaacacgcagaatcacaatgaaacaagcaattttgcgtgtgggaagtttaagtaattaacaaatatcgactaaaatacatatacttaatgctatcttcatgtcttttcttagccgtctctgtctgttcttttttaatgttttgtttattcatttttcttcgtctcatttcttgcctaataattatatttaagcacaaatcaggcaaaaattatcgaaaaaaataactcccgcattcgcaggagttattttcattttcaacgattacttatcttcttttttaagagagccagattcatacagcttttcgtaaagatcaaccatttctccagctaaatctctaaaagtgatagcattcatcaagtgatcttgagagtgaactaccaacaaagttacatgcatgtggtcgccttgagcttctttagttaacatgccggtttgtgaattgtgagcttcaagaagtgatttgtcactttccttcaacttttcacgagcacctgcaatattgccttttttagccaagcgaattgcttcaaaggctaaactctttgcattaccaccattggcaattaaacccatagcagccattaaagtttcttgttctttttgttctggagttttcttttcttctgccataaaatctgtctcactttccttagctattttagctaattaattattcacctttgatcaatttttcagcttgtgccaaaacgttagcaccattcatcatgccgtaatcttgcatattaattacgtctaaaggaatgtccttaccgtctttacccttacctttaaccttgttttcgaagtcacccttcatgtaacttacttgaggcccaagaagtacacaatcgatttcttgttgtgccatcttgtcatcagcttctgatgctgggcaagcaaagatttctgcatcaataccttgttccttagcagcagcttgcatcttagttactaagagtgaagtactcataccagcactacaatttaacatgatagtttgttcagccataataaatttcctcctgaaatttttattttatagtttaattagcttttattgatctacaccaattattataaaacgctttcattgatttgtaaacaaaaaatcatacatgcacggcttagtcttaccatgcttatataatcatctcaagcaaaagatatatacttttatctcctgacagccaatattatataccctttgtaagcatttttaaatacatatcctcagcatgttaagcaaagtcctttgcatacgtatgctttaacataaaaaataaattatttttagcaaacgctttcaattaataaatgaatactgttagaatgtatatgtaatttattcctttacaatagaaaggaggcagaatcttgagtcgctatcaagacattgccaatgatatagaaaaagatattattgagaaaaaatatacaagaaaactacctgaacaatttgaactggcccaaaaatatcaaactagtcgggtcacaatcgttcacgccttaaagattttacaaaataaaaaattaatacggactgtcaagggacatgggacctttattacaagcaagtctattcccgacatttttcttaattctgatgtcaatgagcataccggctttactcgtcatgtcaataatgctctcgcaataaccagtaatgtgattgcctttaacattcgcaaacctagtattagtgaacgaaaagctctttgtttagaaaaagatgacgaagtttacgatattattagacaacgaattttaaataaaaagccagctaaattagaatataccgtgatgccagttagccgcatccccggtatcaccctagatattttgcacaagtcaatctactcttatattcaaaatgatcttgggcttaagatcggccgagcagatcgcattattacagctgaaaaatctgatgcatatgatatgaagtatcttgaatgtaaaaatgatgatcctgttttatgtattcagcaaaaggcattccttaaagacggacgaccttttgaaatttctgagtcacgtaatcgctatgaccgtggtgatttaacagttaatggcaaataagtgttacttgattaaaaaaatcaattatggcaaaatggctctcgtaagcgtttccaattacatacaagaaagtgaggaaaaatttaatgtattcagcaaaaatgcctaaaaactttttatggggtggtgcagttgctgcccaccaacttgaaggtgcttggaaagaaggaggaaaaggtacttctgttgctgatgtaatgaccgttggttcagctactaaaccacgtgaaattactgacggtgttcttgaaggcaagaattatcctaatcattcagccattgatttttatcatcactacaaagaagacattaaattaatggctgaaatgggcttcaaggcttttagaacttcaattgcctggacaagaatctttcctaatggtgatgaagccgaacctaacgaggaaggtttaaagttctatgacgatttatttgatacttgtcatgaatacggcattgaacccgttattaccctctcccactttgaaatgccttttaatttagctaaaaactatggtggttttaccaaccgaaaagtaatcgatttcttcgttcgttttgcagaagtttgcttcaaacgctacaagaataaagttaagtactggatgacctttaacgaaattgataatcagtctgcattcaataatgatttcttgatggctactaactcaggcattttgttcaaagatggcatgactgacagagataaagaagccgccatgtatcaagcaggtcactatgaattggttgcttcagccttagctgttaagattggtcacaagattaatcctgatttccaaatcggttgtatgattaactactcacctgtacgtccgctcactccatcaagtgatgatgtccttttagctgataaatgggagcaacgccgtgactggttctcagatgtacatgtttttggtgaatatccaaatgcagttgaatcctacattgaacgaaatggctatcgtcctgatataactgatgaagataaaattgtcctaaaggaaggcaccgttgactacgttggcttctcctactatcagactactaccgtttctagcgaaaaagttaaacctgatgaattaactgatttggctaaagctgttgctaagaatccaaccttaaagcgtagcgattggggctgggaaattgacccagaaggcttaagaattgcattaaatcaattgcaagaccgttatcacaaaccattattcatcgttgaaaatggtcttggagcttacgataaagttgaaactgatgggtcaattcacgatgactacagaattgactacttaagaaaccatatttcagaaatggaaaaggcagttgaactcgatggagttaacttaatgggctacttaccatggggctgtattgaccttgtttctgcaggtactggtcaaatggataagcgctacggctttatctacgttgataaaaacgatgctggtgaaggtacattggctcgttcacgtaaggactcattcttctggtacaagaaagttatcgaatctaacggtcaagacttagattaattaaactattaatagcaaaaaactgatattcagactttaatcattgaatatcagttttttattttataaatatttactgccttctttaatactcaatttagctaaatgctctcgatgcagttcaatgaagttacgcacccaatctggattggtcttagagtaatcacgcaaagcccagccaattgccttgttgataaaaaactcctgactatcaagattattttcaataattttttgtaataacgcggtgttcatcttctttttacgcaataattgatgctcaatcgcgacccttcttacccagaaatctggatcttgcgaccacttgagcattagatcgtctactcgattatccgttaagccaacatagccataaattttgattaatgagtcaatcgtatcccaccattgctttgttctaacaaaacgctcaattttagctaaatcatcaaaaacaatatactttttcattgccaataaataatcacaggcaaaatattgcaattcgcgttgttcttcatcccatgcctggtctagcaacttccagtcaacttcttttttcttcttttcatctttcaaaaaattatgataaatcgccctacgttctggtgtttgtaggccatagaatagaaattgattttgcatgtaaccaacaagatgattggccttttcttcatttgcccgagcgctaaattctttttttaatgtttcaatattcatgttttttattttagcacaaaaagaggtctccaaattctagagacgcttatcgtaaaaataatcatctacccgatcatttcaactaaaagcttggtagaataaaagtatctatattaagaaaggcataaacaatgaaacaaatttattttaaccatgatggtaatatcgatgatttagtatcttatctgctcttactacaagcaccagatatcaaacttttaggtgttggtgcaattgatgcagacggctacattgatcctagtgttgaagcatgtcgcaaaatgaccgatctttttaacttacgtggtgatgatttgactattgctcgttccaactcacgtgcagtcaaccaatttcctcacgagtggcggatggcaacttattcatttaattatcttcccatgctcaatgaaagtggcaagattaatacgcagaaggcaaaacttcctgctcatttagacatggtcgaaaaaattaaagaagcagacgagcctatcgctttagttatgacaggtccgttaactgacctggctcgcgctttagatgtcgatcccgacattgagaaaaacattgaaaaactttattggatgggtggttctcttgatgggcacggcaacgttgctatggttaacgctgacggtagtcaagaatggaactcgttttgggatccatacgcagttaaacgcgtatttgaatcaaatattccaattcagatggtgggattagaaagtacggaagaattaccacttaacgatgagttgcgtcagcactgggcaagtttacgtaaatatcctgcaatggacttgataggacaaggctatagtctaatcgtatctataccatcagccgaactctacctttgggatgtgctaactacaatcagcgcactatatccagaagttgttgaaaccgaaacggctaaagcaagagtcatcactgatgggttaagtgcaggaagctttgtacgggatcctaaaggaagagaagtaactcttgttactaaagccaataaggatctcttcttccaaaagatggatgaaattttagaaagaaaataacaaaaaagaggctcacgcctcttttttatattgccttaattgactttttgtaaagaattaccgcaatccaaactgaaatgaatgatggcagtatcgcaactacaaacaaatttggatctaaaaaattacctactctgatgaagtttgtaattgaagtaatatgttttatgttactaaatatcgcttgataaactgtaacatatattaacgaccactgaatataatattctaccaaagtgagtgtagttgtcgaaaacttaaaaattttgctagccagtcgcatcccccaataaacaaaaacacctgaaagtacaacaaatgctgctaacagcaaaaacaagtttcccaaattaacatggtcccattgactcatgatcaaatacgcaattaccatgaaaattaagaaattaattgttgaacaacacagctgaatgacaaataaaattgcagcctttaagaattcaaacttgtgctctgatctgaataacaaaaatactactagaataattacagcaatgatgaaatatgtagtaacgtgcacagttatctcctactttgcctgttttaaggcttcgcttgtagcctctttaaccccattggaagtaaatgttgcaccagtaacagcatcgatatgagcagattgtttatccaaaatttcctgctttaatgttttttctgctttttgaccatactgcggcgtttccgtagataaatctaaatctacagttgaaattttattatcagctacagttaatgtcacacctacaaagcctgccatgccgcgtgcacgggcactatatgttccttcttttaacatcctttttcctcttttttataaaacaaaaatactgctatataataaatataacagtattcctaaaaaaagccacaaagatattgtgtttagtatatcatattgatcctgaattgtcaaattaagtgcaacagttaggttatgaagagatatattgcttgaagagttcctctgctgtgtgatattggaggattcggcgatatttgtggttaatggcatcagttgcctgttgaacataagcttttgacttgtctttcatgctcttgcccttagggaagaattgacgcaaaagaccattgcagttctcattggtgcccctttcccatggagaatatgggtgagcaaagtaaatctggcagcccttgatcttggtcatatccgcaaactcagagccattgtcaaacgtgattgatttaaaccaggcaggatgtctgtcaatctccttttgaagcagcctttggcatgtgcttgcccgatagtcaggaatcttgataactacttcaaagcgtgtggttctttcagtcaaagtcattaaagcaggctgattcttgcgtctgacgcctttaaccagatctccttcccagtgcagcggagcttttctgtcttcaatctctttaggacgctgttcaatggaattgccaagatgcttcttgtgcaaagcgtgaccgccatggctgtgatgacgcttgttcctgcgtcttttgagcttcataggcagatcaatattgcttatgtccagcaagccctgatcaatatagcgatagacggttggtgtgctgggacaagggtagcctggcatagtccttttgaattcaccaacgaactcatcgatgctggtggcatcaaatttagctttaaagcgtctggagagcattctcaaaaagacagcataatgcttcaatggattgcgctgatagcagtttttgcgacgcttctcataataaatctgtgcagtatcagcgtaatagtgctcatacaataaatagctgctgtctctttgcaggacacttccgcgtttgatttcgcgactgattgtcgacttatggcagccgacttcttgagcgataacagtacgggaagttatgccggaatccagcattgcttgaatttgtccacgttgtacgctggttaattgatgatagtgcttagaaatgctagaatttgaattggtcataaagatcttcctttcttgatttttcgtcacttcaagtttaggtcttcatggcctttttgtttaacacttagtgttgcacttcaattttaaatccgggtatatcatattgatatactatttcttgggtcttgattgtttttataagtccttattatgacccatgtgcaggtagtagaatccccttctacctgttttattataccacaataaataactgatgttatatcaaatcctaagttcttttgaaaattttctcaaaagggcttttcttgcactatcctttataagttacgttaaaattgaaatggaattataaagttatatttaaagaaggtaaagcatgtatccagataataatattcttacatatttaaaatggcgtggtgacgttgacttctcaacatcgccttttaatgatattgatgcacttgttttatctattttttcttatcttgaattaccaggtattgttaaaagtaacggaacgacaattagtttagaaaaggctgccaagctctattttgcagatgatcatcctcgttatgataatttgcaataccaagaactatttaaattaatggctcatgcagaccgctttaaaaatgcaaaactgtcgtattttattagtacgttaactgaacatactcaatttagtgcaatcaaaattgaactaactgatgggaccaactttattgcttttcgtgggactgacgattcactaattggctggaaagaagattttgaaattagttttaaaatcactgtagcccaacaacaagcagtaaaattgctcgaaactattctcaaagctgatgatcaagattattacttaggcggtcactcaaaaggtggcaatttagctgaatatgctgccattaatattgagcccaaattaagaaaaagaatcaaacgtatttatacctttgattcacctggaattgcagaagaaattggtgctcagctccctaataagtatttgcaaaatactctacgccgctttgtgccagactttagcgtcatcggtcgcttatttgagtcgaaaaatattccagccactattgttgatagtactcgcaagggactaagccaacacgatgctttttcctggcaaataatcggttctaacttcgacaccagacgccaccgcaatgctcaatctcaagtatataatcaactaatcaatcaatggattggtaacgccaccctagaagaacgtgagtctttaactaatgacctcttctctgctttaagctctagcggcgcaactaagatcaacgaacttgataaaaatggttttggcggttttggtgcaattttgttttcactggctgattcatctcggcgaacccgtttcgtctttggttcattattttccagcatttggcagacgatcaagagccagcaactgaccaaagcgcttttctcaacagacacaattgttggttgggtgctggtagtattaggaatcattagtctaactctaccccaatatgcagtgcgcgcttttggcgccctagttgccttcacggggattggtttcagtgttcaccaaattttaacaacggcaaaatctagtctaaaagaccgacaaaaaaacttctttattatttcgtatttagtagtttttgctttatcaaccgcgttaatttctaataaccgtctactaattttcttagctcactacttcttaggactattcttaattatctattcctacattcgaattaggcaactagtctttcgtaaattacccggaatttttcagattactattgtagcgatcgaggcattaattgcttttgctttaggaattatcgtagtggttaaccctagtgcctttaatcggagagcaattattattatcggtattttgctaattgcttacggcttcttcaagttagttggcgaattatttggccagcgcagcaaaatgcccaaaaatcatcgttaaaaaaagcttgttaacttcaatatcagttaacaagcttttttcttagcccttaataaaggtattagcctttatatgctttaaaatgttatacccgattgcacgaatatgatttttactaccataagtttgattcaaaaacattacaattccattctgattatcagtagtcagttgcatccagttaacaaagtgggtatcaccaaaattgccataagcgacttttaaagtttgattctttttcagataaaaaccacctgagtaagtattaaccttagaacttaaatgaccaagataatggaactgttttttagtcagaatcttgccattttgcataccagattggattttataataatcattagccgttgaaaatagattcccagcaccaggcaattgagaaacaacattacgattagcataggcactagcactgtaatttttaccaccagaataaagatatgaaatcgcatcagtctttgaccgcggaatttgttgataaatatcggtttgcttcaacttcaatgatcgaataacccgctgtttcacattagcagcataagactttcccgttactttactgataatgcctgccagcaaaacatagttagcattattgtaattaaatttactgcgtcccgtattttctcgtgcattggcttgggcaattgtccaattgatcgcgccattttcagaaaaattaactccatgattagattctgttccaattacgttaattcctgaggtatgtgtcattaactgccccaccgtaatttggtttgcatgcttcaaatttggataccagcgtgaaatcttagtattctgattgaatttcttctggtagattaactgtgtaattattgcagcagtaaccatcttttgcaaagaaccaactggataaagcaattttgtattgccatttttcagtcgtttgctgtaataaccgtagcctaagctaacacgttgagcatgcccattttttacaatttcaatgcttcctcgtaaatgatgctttttcatcatcttaagcgtatattgccgtagttgcttatttgaataactcttcgcctgcacagcatgatttgacattatcaaacacgatgaacaaaataaaatgaaagctatcccgaacttttttagtgtcttcaaaatttcaatctccttttaatcctgaactattctaccacaatcaaaaagcgcaaaatcacttttaatcatggtttgcgctttcatttttattttttaaaatttttatagtaagttcatcttaactaggtattccgcattttcaaccgtattccatgcagcacccttaagcaaattatcggctacaatccacatgttgaaggcacccttattttcataatcagggcgaatgcggccaacaaaagtttctcgcttacctgttgcattaattggttgcggataaatttgatgtttaatatcatcttccaaaacattacctggaaaggcagcaactgcatctttaatatcttgtgccgttgcagtctcatcttcaagagtaaagtagacactttccccatgagaaattggcacaggaaccctaacacaagttgcagttaccttgatatctttggcattcatgtcatttagcatgatcttctttgtttcatgaatcatcttccattcttcatgagaatagccactatcttctaaaacatcaatttgaggtaacaaattaaaggctaatgggtaatgctttttgtctcctttagtaggtaaaatatgagcgtctgcttgcatgtctttaccatcaaggtagtcttgactttccttttttaattcatcaattgctgcttgtcctgctcctgaagcagcttgataagtggaaacgataatttgtttcaaaccaaattttcttcgaactggttccaaagccattaccatttgaattgttgaacaatttggattggcaatgatgccgtgatgctttttcaatgcttctggattaacttcaggtacaaccagtggtacatctggttccattctaaatgctgatgtattatcaacacagacagcaccacgcttaacggcttccggcagaaacttctttgacactgcaccaccagctgaggaaagtactaaatctacaccatcaaatgattctggtgtagtttcttcaactttcaaatcttgatccttaaattttaaaactgtacctgctgaacgtgaggatgcgagtagctttaagcttttaactggaatcgttgattgttccaattgttcgatcattcttcttcccacggcaccagtagcacctagaattgcaacattatattctttcaccattatttttctcctcgcaaaaaattcttcattctttccatcgcttcatgtagattttcatcactggaagcatatgacattctaacgtacccttctccaccaggaccaaaagcactacctggagtaataccgacttttgcttcaaatgctaaatccagtgcaaattgcatatcatttttaccatatttagctggaatcttagcgaaaatataaaatgctccctgtggtctaactgcttgcatccccatcttagctaattcatccaacacaaaatcgcgccttctttgatatattttgcggtatttttctggatcatccaatccatgctccaaagcttcagtcgctgcagcttgagaagagtcagttgtagtcgtaaccattaaaccatggactttaccaatttgttccataatttttgccggaccagctacataacccagtcggtatcctgtcattgcatgtgacttagataatccagaaatataaattgcccgttcaggaatcacacttgcaattgaaaaatgcttaacgccataagttaaagtactgtaaatttcatcagtaattacgtacagattgtgtgcttttatcacttcagctaatgccctaatttcgctttcggtgtattcaactcctgtcggattaactgggtagtttaagataaccgccttgatattagattcttccttaagtgtactttctaatctttctggcgttaatttaaagttatcttctgacgtgttcattaatacataatctgcatctgctaaagttgcaactggccaatatagtgaaaataccggtgtaggaatagcaaccttatcaccccgattggtaattgaaaatagtgtcgcattaattgcttcagttgcgccaactgtaaccacaatttcagtttctggatcgtaaactactccagttgcttttttcaaataattgctaattgcttgcctaagttccaattttcccttttgtggcgcatagtgtgaatcattatttcgaatactttcaattgcagctgttttaacatgctcaggtgtattcatatcaggctcacccaaagtcagcttgataattccaggaatggttgaaactttattatcaaaaatcctaatccccgaagccttaacagattgaatcttcttacttaaagctaagtcatttgctaattctggcataatttttcctcttataaaatattctctaagccaataactagttcagttaattgatctactttttctaaagcaactttaaccccactcataaaggaatcacgatcaaatgaatcctgtctaatggttaaagcttcgccaggtccaccaaataaaacttgctcatgtgcaatataaccaggtaagcgtactgaatggattttaattccttgataatctccaccgcgaacattggctaaagtctcagtttcatcaggcgcagtttgatgttcaggacgattttgcgcgatcatttttgcagtagctaaagcagtgcctgaaggtgcatcttttttatctgcatgatgcatttcaataatttcaacatcagggaaatacttagcagcttcttcagcaaacttcattaataaaactgccgacattccaaaattaggtgcgattaagccacctaatttttcctttttggctagttcaatcaaagttgcttcttgatcatcactcaagccagtagttcccacaataggtttaatttgatgcgttaaagcaaaataaacattgtcatagacagctgcgggagtagtaaaatcaatccaaatatctgcagcatggtcaggaatttgacttaattggttaaaaatttgggctgttttaggtaaatgatatctttcaggctcatttactgcctttggagcaaatccagccaccaattcaaaattgggcagctgattaactaaactaacagccttttgccccattgcgccagtaaacccagctattagtacttttttaggcatctcgtcttaccaatcctttcctaaattaagtggcaacttttgcatcaatgcattagcatttaaacctaaatgctgggccaacttttctttttcctcatcacctaaagcgactaatggcaaacgacatccccctactataaatccttgagcattcaaggctgccttaacaggagctggtgaaggatacataaacaaagcctgcattttcggcgttaaccagcgttgaatcgtgcccgcctcaggataatttccttcataaagatcatcaaacattcgccgcatttgtttgcaatataaatggctagctacggaaataacgccattggctcctagtaatcttgcaggtaacgcttgcgtatcttcaccactaaataccaaaaaattaggatctttatgatcaataatgtattccatttcttctaaagatgcacattgtttgattcccttaatatttttaaggcgtgataattggactaccgtttctttttccatttttacgccagttctaccgggaatgttataaatcataattggcattttagtctgagcattaacagcactaaaatgtacaatcatgctacgctgatcaggcttattgtacggtggcactactactaaggcataatcaattcctttaatctgtgctacctcattggtgaaggcgatagtggttgcagtgtcgttactgcccgttcctgcaataaccggaacacgtccattaacaatttgaccaaaatgctggtacaagtctatcttttcatcatgagtcagagttggcgtttctccggtcgtaccaccaactacaaagccattgcaaccttggtcaattaaataattaaccagcttttctaaactagcaaaatctattttttgattctcatcaaatggcgtaacaatcgccgttaacaaatctgcatcaattaatgttgccattttattgcctcattctattaatcaaaaatcctttgattgcatcaacgccgcgctgaatgcttttctcatcaggattaagtgtagccgtatgcaattgtgaatcaggatcaccaacccctagccaaaacattgttccagggaatttagccagcaaaaagccaaaatcttcacccgtcatttttggttcagtagtaataaagttaaccgtcggctggcttttcatatatgaaataaagttcttggttaattgtgggttattttctactggccaatatccaccttgattcaagtctaacttcacttctacaccaaagcttttctcaataccaagacagatttctttgagacgttgatcgattgtcaaaatcatattttgagttaagccacgaatcgtgccctcaattctagcttgaccagcaattacatttctaatcgtaccagcttcgattttgcctagagtaataacaccactttgaattggatctatgcttcgtgaaataatagtttgaacctgcatgatcaaacttgctgctgcaactaccgtatcatttgcatcttgcggaaaagctgcgtgtccacttttacctagaatatcaatattgacttcagttgtaccagcaaaaagtgtacccatccgacacccaatgctaccagcaggcaaagcggggttatcatgcaagccatagaactcgtcaggtttaaattgatcatgaaaaattcttttttcataagcttgcatcccaccactttggctttcctcggctggctgaaagaaaaaaagcaaattatcttgtggctgattttcactaaaatagcttaacaaacctaatgccacggtcatatgaatatcatgtccacatgcatgcattactccctcatgttttgatgaaaatgccagtccagttttttcagtaactggtaaagcatcgatatcagcacgatatcctatcgttctgtgtggttttcttcctttaactaatactagaattgcggtaggcagtgtcgacggtatctcaacttccaaataatcttgcttaaatttttgaattacctcgattaaataatcatgtgtttctttttctgctagtgctaattcaggtatttgatgtaaatgccttctaatttgaattaactcactttcacttaaaactgacattttataactttctcagattatcttctagttccgtcttactactagttttttcatcaacttttttaataattttagcaggaacgcccgctaccatcgtatgtgctggcacatcatgagtaactactgctccggctgcaataacggctccttcacctacatgaacaccctcaattacaactgcattagctccaatcatgacattatcatcaatttgaaccggtttagctgaagcaggctcaattacaccagccaatacgctaccagctccaatatgacaatgctgtccgacaatggcacggccaccgagaactacgcccatatcaatcatggtattagccccgatttctgctccaatattaataatggcacccatcataattactgcattattaccgattaccacttgatcacgaataatagctcctggttcaattcgagcattaacttttttgaagtccaataaaggaactgctgaatttcgtgcatcattttcaatatggtaggccgtaatttgatgattttcttttaaaaatggttcaatatctttccagtcaccaaagatcacgccagaatgagcttcagtaaaattctcaattttctttggaaaatcaatttgtgctaaatctcctttaataaagacttttaccggtgtcttttttggtgcattaccgatgtaatcaataatactttttgcatttaactttgccatcttttttctcttttctaatttaaatatgattgatctaaatgaaccaagtcttctaaactttcacgcttaatgactaattttgctttaccattttctgcaaataccactgctggtcgaggattacgattataatttgaagccattgaatacccatatgcacctgtatccaacatcgctaacaagtctccagctttgacttgtggcaaagcttgatcttctgctaatatatcgccactctcgcaatacttaccagcaatacgaacatgttcagtcaaaggcgcttgtggatcggtggctaaaactgtttcatacttagcctgataaagtgcagggcgaatattatctcccatcccgccatcgacagtaatataagaacgataacctggaatatccttacggctacccaccgtataaaggttgtaaccggctggaccaacaattgatcttcccggttcaatatcgatttcaggtaaaggataattcattttttcagcttcagttttgatcaccttaacaatcgtcttaacaaattcttctggtcgtaatggatgatcttcttgggtatatttaatcccaaaaccgccaccaacattaataacttgtgcaagataaccatacttttctcgccaatcttgcgctactaccattaatttttgtgctgccatttcaaagccgtttaaggcaaaaatctgtgagccaatgtgagcatgaatccccaacattttcatcctaggattagctagaacttgttttaatgccttttctgcttgacctgattcaagatcaaagccaaatttactatcaatctgacctgtttgatcatattcatgggtatgtgctgaaatccctggtgcaatacgcaacatgacactaatcgtagcatcgtacttttttaaaacttgcgccaataactgaatctcatgaaaattatcaataataattttgccaacatgattttttacagccatttccaattcagttaatgatttattattaccatgaaagctaactctctccattggaaaattggcttttattgcagtaaataactcacctgctgaaactacgtcagtgtatgctccctcttctgcaataacttgatacattgcgattgcagcgaaagctttacttgcataactaacagcataggccatgttttcttcttcaaaaactttcttaaaagcccgaatttgtcgacgaatttgatcgacatcataaactactaatggcgtaccatacttttgagctaattctactgtatcaactccaccaatcgttaaatggccttgctcattaatctgatctactgcaatttgtgaattcattttgttctcctgtctttttcaggcgaaacgctaataaaaaaatccattgtctgcgccaaacaaacaatggattaatttctacttaatctatggtcgatagcgctccgcgaattttgttcgcgacagtccgcagtttattcaactacgccccagctcaagcctttagcatgactcagcttcggcaacctccccttttacaattcatcttcgttttgccaaactcagaattgttacttatgtcggctgcgcctcttcgattgactgtagtttacaattttataaaaacatagtcaacaaatttattataaaaatttaattttatttgtaacaatgcggcatttagagtgataaattacagtcatcacttgcaagattaaaaaagaatgttagaattcaattaaatttagtctgacttttttatttaaattaatgatttctgaaaacaaaaggagttttgaaatgaaaatcgtaaagtttggtggctcgtctttagctaccggtgaaagtgttgcacaagcaattcaaattattctcagcgatcctcaacgacaagtaatggttgtctctgccccaggcaaaaggaatacaacagatatcaaagttactgatctgttaatcaagtacgcagatttagccttaaagcacaagaattgtgttgaaatcgtgaataaaatttttagtcgctatcaagaaattggtcattattttggcttagctgatacggaattaagtattattaaacaaattttattagagttgcccaatcagggttatcctaacgaaaaatatcttttagctgcatttaaggcacatggtgaacggcttaatgctcgtttaattactttaattttacgccatcaaggaattaatagtcgttttcttgatccggctgaagccggtttaatcgtgactggcgagcccaatgatgccattgtcaatccagagagctacttaaatcttgaccaaattaaaattaaggctgatgaacgtatcgtatttcctggcttttttggcatgactccgtctggtaatatcgccactttttcccgtggcgggtcagacattaccggggctattctagctcgcggctttcatgctgatctctatgaaaattttacagatgtcaatgggatttttgccgctaatcctcatattattgagcatccccaatccatcaagaaaatgacttatcgcgaaatgcgagagttgtcatatgctggcttttctgtttttcacgatgaagcattgattcctgctattcaaggacagattcctatcaatgtgaaaaatactcatgatcctagcaatcctggcactatgattgtcccagaaaaggattttgtcccagataatgcaataaccggcgtaaccagccaaaaacatttttccgcattatatttgcataaatatttgctcaataaagaagctggtttcaccttacgtatattacaaattttataccaacataatattccatatgagcatatgccatctgggattgacgatattaccattatttttaacaatgattttctaaacgatcagttaattgatcaaatttgtaatgaaattcaagctacaattaatccagatcaactcgaatggattgaagattatgcaattattatggttgtcggcgaaggaatgcgacaaaaacataccatcagccgtcaaattatcgattctttaggcgatcatgatatttcaccacaaatgatcaatcagggagcttctcaaatttcaatcatgatcggtactaaaaaagaaaaggctgatgaagcagtaaaaattatttatcaaaagttttttaattagggggcattatgattaatttattcaaagttcacggttcgcaaaatcatttctttattcttgatcaaacacaattcgaacacgaattaagtgacgccgagctaaaaaattttacgcaaaagattaccaatccacaaactggactgcttcacggagcagatggcgttttagtagttaatcatcccgtgcattctaactcacttggccagatgcgtgtaatcaatgctgatggaagtgaagcatcaatgtgtggcaacggtctacgcaccgttgctcgttacctaagtgaaaaaacgggaaaagataatttcctagttgacacaatgaatgccagcttacgtgttagaagagaaaaagattttgcttctaacgtgccagcatttgcagttgagatctctcctgtacgctttaataaagaggcactcccttttgataatttaggacaagaacggattattgatgcttggttgccagaaatttatcctggattacgttttacttcaattgccgtacctaacccacatttaatttcttttgttaatcaagcagaaattaccggcccgatcttaggcattgttggtaaaaaattaaatagcaataatccctactttacagatggcgtcaatgttaatttcgcgcaaattttagataaaaataaactttttgtccgcacttacgaacggggcgttggttttaccaatgcctgtggtactggaatgtccgcgacttctcttgctcttactttaacccaccccgaaataggcaacttaaatacaccaatatcagtttataatcctggcggtatggttaaaactatcgtgcattatgaaaaaaatagttattggatcgagcttattggtaacgctacttttactcatcgaattaagctttctgaagctgacttaaggaaaggtgatttttccaatgtccagatccaaaagactgctgaacaaagtgcttatgaaaaatttattgctaatctgccaaagttcaatgacattacaactttagcgtaaaaaaatggcttgcaacacgcaagccatttttactttttaattattaatctaagtctttcaagccatgctttttcttggaaacgcgataaaaaatataagctactaaaccaaagaaaattggaccaaagcttgtccaaaaagcagttgcatatctatgctccaaaactggttgcaaaaccgtaaatataattccggtgcaaacaatcagctcaacaaagactactaacgcaaccgtccatttatagttagtaaacactccaaacttgcgcggataatcttttttaagaaagaatggaaatgcaccgatcaagaaaatataaggtgcagtagcggctacgttacccatatccgtcagaatttgataaaagctagtcgctgcgctaccaccgaatgagaccaccgcaattaataggcaaacgaagacagtttgagcccacatcgcattagcaggaataccgtgtttatttaatttagtcgctgccttaggccataaacgtggatcagatcccatgatgaaggatttaattggtgaataaagcaaaacaaagagagcacctgtcattcccatcaaaccagataaagcaattgctctagtaaagaatttaccaatcaataaactcgtgttaggatccaaatgaagtgcggttccaaaggctttgccaagtgtgccatatacggtatacgtaatatttccagtattggcattggctgctaaaatatctttttgataattaactgaaaagccggtcataaaaatcatcaaaacataagaaataatagtgaacaattacccaataattaagcctttagggaaatctttttctgggtgtttcatactgtcaatcacaccaccgacggtttccatcccaccatatgcaaagactgcataaactacgaaagaaataatcgtaattggcgtttgaaaacttttattaggcgaaataataaaactttgccacccagtaatcggctgagccaattgcccatgattcataatcaagaccgttaaactagctagaataaagactgcattcattacaatcatgaaccaaccaccgattgatgacataattttaattccagttatccctctggaagacaggtacgttgatacaatcatgaataaaattgctagtacacctatcaattgagtaccatgcaagcccaaaatattccattcttgagttgtatctttgccaaaaataagggcagagattgaaatccaaagccttgaggcgcttgcaaccagccacagcacccagttagccagccatacaaaagtcccaataaaggcctatttttgtccaactgagccagctaaccatgaataaataccaccttgagcatcatgaaaagcagacccatattctgccatcattaagccagctgggaaaaagaaacagatgccagccaaaataaacaaaatgatcccagcatatgtcatttgctcataagaaacagaaacattgccaaaaccataaaccgttgtgataatcatcaacacaaggctcatagtcgtcaatgattttttagtttgtgaattttcatcatccaagataaagcctctactttctatttacactttccattttagcatcgtttatcttgaataaatttattctaattttaggctcataagaaaaaactactagttattcactagtagcccttcatttttattcattaattcttttttcaatccaattacttaattcagttacatgtaatttagtgaccgaactaaaagtcaaaacggtgacatgatcatagttgagattcaactttttctttaagcctgacatcaccttattagtttgactcttttttattttatccatcttggtacaaactaccaaaattgggatatttagatattgagcataatcatacatagcaatatcatctttggttggttcatgacgactatctactaagataattagtccctttaggttgggtctagtttctaaataatcttgaatcatttcgccaaattcttgccgcttcttctgtgaaactttggcatagccataacctggtacatcaaccaaataaaatttttcattgactttgtagaaattcaaagtttgtgtctttccaggctgtgacgaggtcctagctaagtttttacgctttaatagggtatttatcaagctggactttcccacgtttgagcggcctgctaatgcgatctcaggcaagttatctttaggatattgatcttctctaacagcactaactgcataactactgcttttaatgatcattgacacttacctgttctttattatcagtatttttgcggattacctttggcttagcgtgcttagtaattacgtccttagttacttcaacggtctcaatatcctcttcactaggagtttcatacataatatccataattgaattttcgataattgttctaagtccacgtgcacccatatttctttggattgctaagtcagcaattgccttcagagcaccatcagtaaacttcaaattaacatcatcaagtgataacaacttcttatactgcttaactaaagcattctttggttcagttagcactctgaccaaatccttactactcaatttatcaagcgtagtaataattggaattctaccaatgaattcaggaatcattccaaatttaactaagtcagctgtagtcaaatggcgtgtccaatcatctgcattaattttatctgcctcattttcagcaccaaagccaatggtctttttacctaaacgatttttaacgatttgttcaattccgtcgaatgccccaccaacaataaatagaatgttagtcgtgtccatcttaatcatttcttgttgagggtgtttacgcccaccttgaggtggaacagaggcaattgtaccttccaagatctttaataatgattgctgtacaccttcacctgaaacatcacgcgtaattgagacattctcagattttttagaaattttatcaatttcatcaatataaataatgccacgctgtgcacgttccaaatcataatcagcattttgtagtaacttaagcaaaatattttcaacgtcttcaccaacataccctgcttcagtcaaggtagttgcatcggcaattgcaaatgggacatttaaaatacgagccaaagtctgagcaagatatgtcttacctgatccagttggtccgatcattgcaatatttgatttttgtaattcagttgaagaatcaacatccatttggctaattctcttatagtgattatatacagcaactgataagacttttttagcacggtcttgaccaataacatattgatcaagttccttttttatttcaacaggcttaggtaattcacgagctgctttaagtgaatctgctcgtaattcatcgtcaataatttttttagccaagtcaacacattcattacaaatatatacaccgttaccggcaatcattttcttaacttggtcttgagttttgccacaaaaagcgcatttaatctcttctttatctgtaaactgatttgccattatttttcctcctatatctaccaaaaatcagattatcataaattaactaatattgataaatattaagctcgaacagcaaaaaaagcggcctatagccgctctttttgagaaattagcaaatattactattacttgctttccttcttgtcatcgtcttctttgttttcaagctttgacttagcaacttgcttagcattatcagtaataagatccatagccttacgtacagtaatgtcgtggcctaacatgtcatctgataaggtgttacgtaccatcttttcatccatgttgtattctgaagcaagatccttgatttctttatcaatttcttccttagttgccttaaggtcttcagcagcaacaatagcttcaagaactaagttagttttaactctttcagctgcattcttttcaaattgtgaacgcaattgttgttcgttggtattagtcaacttgtagtaagtttgtgggtcaataccttgacgttgcatattacccaagtattggttcaattgagtatcaacatcttcttgaatcatagcatcaggaatttcatcgatagtagcgttgcttacagcaccttcaattgcagcttcttgaatagcgtcgtttgcttgttgttccttttgttccttcaagtccttcttgatcttttcctttaagtcatcaagggtgtctacagagtcatcaacgtccttagcaaattcatcgtctaacttaggaagttgctttgacttaacttcgtgaatcttagttacaaagtgtgcttctttaccagctaaatcctttgcaccgtaatcttcagggaaagttacaactacatcaacatcatcgccggcttcatggccttcaagttgatcttcaaagccaggaataaatgcacctgaacctaattcaagtgagtagttttcagctgagccgccttcgaatggcttgtcgtcgatagtacccttgtaatcgatagtaacagtatcgcccttttcagccttacccttcttaagaacaagttctgcattttgttcacggcgcttgtcaagttcagcatcaatgtccttttggtaaacacgagtgttttgcttaggaacttcgatacccttgtagtcacctaacttaacttctggttctacagtaacagtagccttcatagtccaatccttgtccttatccattgatacaggaacaatttgtggttggccaactgctttaatacctgcttctttaacagcagcagaatatgcatttggtaatacaatatttaaggcatcttcatataatgcttcttcaccgtaatattgatcaaagatcacacgtgatacgtgaccctttctaaagccaggaacacgcaagtttttctttactcttctaaaagcttggtctaaacctaatttaatttcatcttgtgaaatatcaaaagtaagatcaccggttgtcttaccggtcttttcccatttaacagacattaattaaatacctccaatgtcaaatttgagtttgcttcttgcatactaagttatcttaccttaaaaggccgcaaaaaacaaatttaaaagaaaaaagatgcgctcctgtgaagaagtgcatcttttttaactatatcgttagaaattagtcaaggatttcagtaacctgaccggcaccaacggtacgaccaccttcacggatggtgaacttagtacccttttcgatggcagctggcttgattaacttaacagtaaattcagtgttatcaccaggcataaccatttcagtaccttctggcaattcaatttcaccagtaatatcagtggtgtggaagtagaattgtggacggtagtctgagaagaatggggtgtgacggccgccttcttccttcttcaagatataaacttgacccttgaattccttgtgggtttgaattgagcctggagcagccaatacttgaccacgaacaacttggtcacggtcaataccacgaagcaatacaccaacgttatcgccggcttcacctaagtcaagagtcttgtggaacatttccaaaccagtaacaactgacttaagaaccttgtctaccaaaccaacgatttcaacttcgtcaccgaccttaacagtaccacggtcaatacgacctgaagcaacagtaccacgaccagtgatagtaaatacgtcttcaactggcattaagaatggcttgtcagtttgacgttctggagttgggatgtattcgtcaacgacgtccatcaacttaagaatttgttcttgagcttccttgtcgccttgtaaagccttcaaagctgaaccacgaacaactggaatatcgtcaccagggtaatcgtattcagtcaacaagtcacgaacttccatttcaactaagtcgatcaattctgggtcgtcaactaaatcacacttgtttaagaaaacaacgatgtagttaacaccaacttgacgagcaagcaaaatgtgttcacgagtttgtggcataggaccatcagttgcagcaacaactaagatagcaccatccatttgtgcagcaccggtaatcatgttcttgatgtagtcggcgtggcctggagcgtccatgtgagcgtagtgacgattttcagtttcgtattctacgtgggcggtattaatagtaataccacgttccttttcttctggtgcagcatcgatttgtgagtaatcttcagccttagccaaacccttgtcagccaaaacagtagtaatagccgcagttaaagtggtcttaccgtggtcaacgtgaccgatagtaccaatgtttacgtgtggcttagttctaacgtaatgttctttttctgccattaaaatgaccctcctgtaaatttgcaagaagtccgttgagataagttaacggataattctctgttgaatattgtactactttcttcggcaaatgcctagtaaaaaagcttaagcgaaattgcctaacgaaaatatcctttgctaattatactaaatagtttgaaaatgtaaaccttttttacttattttttattgcggtaagtatttatatattttttctagtaatttttgatgactacggccatcttttctttgtaaaaatgaaactaaatcactagcaaaactgtcaggctcatcaatatattggttaattttagggtaaagactgcctaataccaaattcacttctcccagcattaatggcaactgacttggactattgtgaaatttgcttccaatgctagaaataatttcacggtacttaggttctttttctagaagcagtgtattcgccggaataaagctctccatctggcctattacccaaatttcaaacttttcttcaagtcccaagcgaactagatcttcacaaagtgacaacctaacagcaaaatctggcgttggatctaataagacgcttcgtgcaaaagctttaaaattaggcaggtttaacttatgtaaactttcataatccaactgagtaacctgttctcgttgtttaaagttttgcataatctgccgctgtttttcttcagaagctggttttaccttttctgataagtccactccaacaagattttttagttgtagagcttcaataaaaaaattatttttagctagaatttgacagtaacttttaaatactcgctgatcagaaaaaagatcaggctcctctttaattaaagcatatgcctgatcttcttgtttattagcgcaatagagtttgcagagtttcaaaataacgtccaatgaatgctctccacgtaatgcttcttctagattttgaatagctgcttcgagatctcccttacgctcatcttcttcagcaagtttcaataaattttgttggcttactgatgtcatttttagtctttcttattactttcttttttccctgaattgtcaaattaagtgcaacagttaggttatgaagagatatattgcttgaagagttcctctgctgtgtgatattggaggattcggcgatatttgtggttaatggcatcagttgcctgttgaacataagcttttgacttgtctttcatgctcttgcccttagggaagaattgacgcaaaagaccattgcagttctcattggtgcccctttcccatggagaatatgggtgagcaaagtaaatctggcagcccttgatcttggtcatatccgcaaactcagagccattgtcaaacgtgattgatttaaaccaggcaggatgtctgtcaatctccttttgaagcagcctttggcatgtgcttgcccgatagtcaggaatcttgataactacttcaaagcgtgtggttctttcagtcaaagtcattaaagcaggctgattcttgcgtctgacgcctttaaccagatctccttcccagtgcagcggagcttttctgtcttcaatctctttaggacgctgttcaatggaattgccaagatgcttcttgtgcaaagcgtgaccgccatggctgtgatgacgcttgttcctgcgtcttttgagcttcataggcagatcaatattgcttatgtccagcaagccctgatcaatatagcgatagacggttggtgtgctgggacaagggtagcctggcatagtccttttgaattcaccaacgaactcatcgatgctggtggcatcaaatttagctttaaagcgtctggagagcattctcaaaaagacagcataatgcttcaatggattgcgctgatagcagtttttgcgacgcttctcataataaatctgtgcagtatcagcgtaatagtgctcatacaataaatagctgctgtctctttgcaggacgcttccgcgtttgatttcgcgactgattgtcgacttatggcagccaacttcttgagcgataacagtacgggaagttatgccggaatccagcattgcttgaatttgtccacgttgtacgctggttaattgatgatagtgcttagaaatgctagaatttgaattggtcatgaagatcttcctttcttgatttttcgtcacttcaagtttaggtcttcatggcctttttgtttaacacttagtgttgcacttcaattttaaatccgggactttcttttttcttatttatttttgtttttttattttcgtctttggcatggttcttattgtcattttgtgctttttcattgcgtttctgcatagcacgatgacggttttgatttacttccatgaccacgggcaagatcactggacgacggttagttttcttgtataaaaacttctccaaatcaccgcggatatcttgcttcaattcagtccaatcaaactttttgtgttcaaaattggcctgaattgcttttttaattacatcaattgaatcactcatcaactggcgattagccttgatatagacgaaaccacgactagtgacttttggctctgcaataatctttttcttcttacggtcaattgtaacaaccgcaataaagattccgtcatctgataggacctcacgatcacgtagcacaatattaccaacatcaccaacaccagaaccgtcgatcatggtatcttcacctggtactgggtcagttaagaagaaacgcttctgcttaaagtcatattcaagacagtcaccattcttggtaatatatatatctttaggattcattccagctttaatagccaaatcacgtactacttcaagtaaacgatattcaccaattactggaattaagaattttggcttcaaggttgtaatcaaaagttgcagatcacgaccagttgcatgcccactagtatgtatatttctgcctaactggataaccgtaccgccagccttatataccaaatcactggtttcagctaccatcgtttcaaccgcatgtgacggagtagttgcaataaagaccaaatcgcccttatgaatcgtaatcatactatgacgcttcttagccattttttgtaatgagttaagtggttcacccatacgcccagtctctaatataactgtctgctcatctggcacagtcttcagatccttaactcgcatcaacaagccttcaggcacatctaaatagcctaatttcattgaagttctaacaatcttagctagatcgcggccagttaataagacgcgtttccctgttgctgctgcagcatttaaaacttcttgaacatgattcaagttagaggctttagcagctacgataattctgcctttagcatttctgaagacattagtcacaaatttaccaatatcttgttcagatgcattagggaaagatgcttctgcattagatgaatcacttaaaagcgctaaaacgcccttttgttcaatttcagctaagcgatccatatcagtccgataatttaacgcagctgttggatcaaatttaaagtcaccagtataaacaatttcacctgctggtgtatgtacatctattccaagtgaatcaggaattgagtgtgtcgtatggaagaatgaaatacttgcattcttaaaatcaatttcagtatctgcatcgattacgtggaacaaactattcttacggcgtttgttttcgcgttgtacttcaattttagcaagttcgatactcaattgtgaaccaaatactggaatatcgtatttacgcaaaatgtatggcaatgcaccaattgaatcagcatgcccatgtgttaaaaagatacctgctactcgatctccgtattgttcaaagaaatcaaggtcaggaattactacatcgataccaaataaagaactatcagggtactttaatccggcatcaagaacaaaaatttcatcattaacttgaacagcaaacatgtctttaccttgttcacgcacaccgctcaagatcataattttgatttgatcagccattatatttccttttctatctaatttttaattcttatggatctatcgatctcaacgtaaaaataatctgtttcaattttagcataaagaataaaattatgacagagacaaaaaaagccagccttttcggctagcttcattattcaatattatgtgaaaattaacgacgaagacctaacttcttgatcaattcacggtaacggttaatgtcgttgttttcaaggtaacgaagcaagttacgacggtgaccgatcttcttaagcaaaccaacgtatgagtggtggtcatgcttgtgactcttcatgtgatcagtcaagttgttgatatcagcagtcaaaagagcaacttgaacttcaacagaaccagtgtcaccttcgtgagttgcgtattccttcataatcttttctttttcagtctttgaaattgccatagttaaattcacctttcattaaataattgccgttaacaacgtttatcgtcggcgtgaacaaataaacagcgttagcggttcacaacagtcataatcatacacattattttttaaaaaagcaagcggaaattaccttgcatccgtgatatttcttaagtataatggatgaagtaaatttctaaatcattggaggtgaatttcatgccacaaatcaaatcagctatcaaacgtgttaagactcaaaacgctactaacgaacgccgcgcttctgaattaagcaagttaagaactgctatcaagaagtttaagaacgctgttgaaagtgatagtaaggaagacgtctccaagttgcatttagaagctgaacgtgctttggataaggctgcttcaaaaggcttaatccacaagaacaaggctgctcgtgacaagagtcgtttaaacaagttagcaaacaagtaaatcttacttattactaataataaaaagaggagatctgcagtgatctcctctttttgtatactcttagacatttaagataaataatttcaaaaaattatcttctcggtaagttccatttttatatttaaattctaagtcgattgcatcccttaataaattttctagcttgtctatcttcaaccgattacgtagggctaacttaaccctatagggatgaacgcctaattcttttacaatttgtggttcgctacgacctctttgtgctaagatcttaacgaccaaaatcaattctaattgattttcaaagaccgctaataattgaattggattagtcccttcacgtaattgattatctaagcgctcaactgcttcacggtaattcttatctaaagccgactccaaaatagcgaaaatattttgtgctagggacaaatctacattttgcattactgatttttcagtaattttgttatcggtagctaccatttttagcttttgataattgcttaaaatagtgtcaattacctgatcactccgctcaattagcagctgtaaagctgactgtgtgattatatatccctcatctttgatcaaggctttagtcgttgaagcaacttcatagggcctaatttgtggctcaaccacattgaattgctttagaacagttttagtcagttttttacgcctatcaattttttcataagaagcaacaattactactacatcttctaaatcagctaagttttcaaaaatcttttgtaagtcatcaatttgtttctgtaattttttagataccttagctgttaaaaagaaaggatttttgactacaataaatttctgttcactaaataaactggattcagttaagctcgcaatcaattcatctaagccatcgctttcgcaatcgacagtcacgtgctccaaatctttaaagcgatcttccttggcatatgatctcaccaagtaatcattgagaaagtcatctgcaccccaaattaaggtatgtggattattgttatttgtatttttaaacaaagaaagtaaggtcattttttatcccgctttaaaaagtaactaaatctaggactttgcagtccgccataataccagctaatcataccacagtcttgcgttgaaacccatggtatttgctgttgagttagtgtcgttagcgtctcttgatgggggtgcccgaacctattttttcgaccagcagaaataaaaacttgcttaggatggattgcacgtaaaaagtctggattggatgatgttttactgccatgatgacccaatttaaaataatctacctgaagtttcatcctctgcataatttccttttcaccatcttgacctaaatctcctgtaaacaaccaattcttattcgctactctaaaaagcaaactcagggaatcttcattctttccttctcctgcttgatatggataaaccacattaaatgtaatctgcggttctttcacccgcattcctgcaagtaactccaataatttggtatcttttacacgaccatctaatctcttttgaaaagatggattcttaattagtccttcggccataaataatttcttaacattaacttgctctagtaatggtcctaaatcaccaacgtgatcggcatcttgatgcgaaacaaagactccatcaattgtattaattccctgacttttcaaaaatggaatagtaattcgatcaatctgaggtgtctgctttttgccactaaagtttagtttcccaccagtatcaattaaatataccttgcgaggaaatggcgtagtcactagaatactatctccttggcccacatcaatgaaggttacttgccctcgcaaaggaaaatgaatcatgctgaagaaaattacatacaagctcaacaagcccaccataattttcttactattaaagcgccagttaactttttctcttaaagaaacaattaaaataatcgttgctattaatagcaacagacactgccaccaattaatttgcccaaaagttagtagtcccaacttagtagcagataattgcccaatgattttctcacctaattcaagcactttttctaatatcggagcaaaatctttagtcagaccaaacgtcacaatattgaaaaaagcaattggtaaaactatccaattgaaatatggcactactaacatattaaaaattacagttaaaaaattgacctgataaaagaaaagcaatagtaatggcgttaataaaatatttaacaaaattgcttgtttaaaactgccaaacttatcagttaactgtaaacccaatgccaaaatatagctcaataaggctccagttgccagaaataaacgcggtactactaaaagatgtaaaatgcaggtcaatcccagcagatctatcgacgcaacatgatatttcttaaacttacaaattttgcctaaaaagtaggttaaactagctcttacaaagccggcttgaccattgcttagaaaaatacctagcaataaaaccaatgtacagcagacaaaagtttcttcatccgtcagtttcaagttaaaacaaaatacactaattaacaagacatagattccaacatgtaagcctgaaatacttaacaagtgaataacacccaaatctcgataattatttagtatttcttgattttcttgagcattattttcacccaagattaattcactagcgaaaaagcctaataactgtggcatcttggcaaaatagttctgcaattcaaaacgtaattgatgcaattgatccccaaaatcagtaatcgataatagcttcatttgacaactactgtatttcaatttttggtaaatctgttttgcctgataataattctgaaaattaaactcaccaatattagttgctggctcaattgaattgcattccccattaatttctgtcactaaaatagggttcccatgcttaagcagttctttttgaacatctgttaccttgccaccaattaaaattttaccttgagcgaaattacccacacctgttaagtagtcgtctttaattcttacctgatcagggtaaattcttaattggctctgctgggttaaaacaaaattggtttttggtttacttaaaaaaatcagtaatagaaatgctccaactattagactaactatttttaaactaactcgatatttttgtactaacagtagcaaaaagtaacccagaaaaaataaagctactattttttgcaccattgttgtacaagaaaaagccaaaaaagagattgtaattagcaacaaagcggttattaagtaaaagccaacttcatttttaaacagccaattgatctttaaggctcgcaaaagttttttctcctattcctgatacctgcattaaatcttctatctttttaaaagaaccattttgttcacgataagcaataatctgttctgcctttttttgaccaattccagttaacttttgtagttccgttacattagcagtatttaagttgatcttagtgccatccccttgattacttgggctactgctactagtactcccactattttgactattatcagctgatcctgcagttgccacattttcaaccttttcacccttgtaaggaatatgaattttatcttgatccttaagcaaagtagcgcggttaatagcttttaattgtgctctagcagtagtacctccagccgcctcaattaactcctgcagacgagcaccatttttcaatgtatatactccctgatgcttcaccgcaccggaaatatcacaagttacagtcttagaaacggttgttgaactactgctagtcactgcattagtattagtggttgcacctgaactactagtgctagactgcataacttgatcctgcactgcagcagcattttcttgatgatcccctttcttcaatccataaaatccaactacaagaattattgcaccaatgagatatgcttttttctcaagcacaaattcttttactttttcaaaattcataaaaatcacctctactatttattacgcaaaaaaagcccagaattttttctagacttcaaattttttgaatttttttagtagtgtgtctttagatagtttaatgcatcatcaaaagtgctcacagggacaattttcattttggtgtgaattttctttgcggttctcttagcaaccgcataattagtttcacttttcttcacactggttgaatcagtcggcgcaaagaagacctctgcaccttctctgctagcagctaccacttttttatcaacaccaccaatgattcctacttttccggtaggtgaaatcgtacctgttcccgcaatcttatgtcccttacttaagttctgcttggtaaagacctcatagctttcaagtgtaaacatcaatccggctgaggggccaccgatttcgccagcattaatttttaacttaggcttagttttcacaactacatgctcaactaattgaatcccaattcctggcttattagtaccctttactttaacaattttgccagtaaagtgtttctcttgcttaccacgcaaaactgagattgttactcgtgcaccaatcttttgtttacgcaaataattcatcatctcttcagttgagctgaaacgatgcccgtttgcgcctaaaacggtatcaccaatttggagcttatttttaaaactagaatttttctggacttccattacataaacgcctagatattttaagctatgctggttacctgcttttttagctgcataataaattgcattctgctgacttgtttccatataccagttttgcaactcattatattgagcactagtttgacctcctagcagctccttgcttgatacacgctcatcatacggacgagtaaaactccatagatattgcaaaaccggagccggccgactagttacgctaactgtcaccaaataaaaattattcggacgtttatttgatgacttaataaactggcccacgggcattgcctcaccaagatattcaatataataatcggtcggccaaacagcaagtaccactaataaaacaagcgcaattagtgccaagagccaattacgcaagtgctttttcgattgattgtttttcttattattcatgttttagcttctctctcaatgcaatcgctgcttttttaggtaaaaacagactaacatcttcatcaaaacgagctaattccttaatcatgcttgaagctacaaaagaattttctggactcgtaaaaagcaaaactgtattcacatctggagccaattttttattaatcccagcaatctcctgttcatagcggaaatcagcactgttgcgtacaccgcgcacgataactttagcatgcaattcatgtgctaaatttacggttacttcttccggtctttctagcacttcaatattaggtatttcccttagtgcatccctgattagatcagcacgttcttcaggcgtaaacaagtatttcttagctgtattggtcatcgcaactacatatactttatcaaaaatttcagcagcctttttagcggtctccacatgcccattagtaattggatcaaaactccctggaaataaagcgattgtcattattagtcctttcgataaatcctcacaattgtttttcctaaatggtgttctttgatcaatgaaaaaccagtaatttcacccagttctgtatgatcatcagtttctgccaccacaattgcatgatcattaagtaagttcgactttaccatctgcaacatgtccttagcgattttttctttggcatagggcggatcaagaaaaactagatcaaacttttcatcattctcagaaaataattttaatgctgcagagctgcgcatattataaacattaaaacgctgctcttccttagttaaagcaacatttttcttaataattgtacaagcagcatgattaatatcaaccagactcgcatggtcacagccccttgaaacagcttcaattcctaaggcaccactaccagcatataagtctaaaacattaccaccatgaaaaaattgtcccaatgaattaaaaagggattctttcaccttatcactggttggtcttgtccgattacttttcaaagtaaataaatttcttttagcatatttccctgaaataattctcattttagttgattctcacttttttcttgttcaagttgcaatttcttttctgctttttgggccatctcagctaattgattttcaatatgttggctatccaaatttacttcttcttcagctgaaatttcgacatgattaacaaaatccaaatgagcaatttgtcctttgatttcattgcattcgttgcgattaacataaagaacacaatatttcatttttttagaaaaataaacaatgtcaccaaaatggcgcaacttatattgatcactaactgattttaaataaataatcaatgctacccttttaattaagtgggtactttcaatttctttattgatactcatgcaactgtttcatccttttcctgtaacattttttcatttgctgaaacgttcagtactaaaccaatcgcagcagtcaagacaatcattgatgaaccaccatatgaaataaatggcagcgtaacccccgtaatcggcaacaatcctagtactgcaccgatattaaagaatgcttctgtaaaaataatagtcgtcacgccaaagcaaattaatgcgtcgaattgagaaaccgcgtgaaccccaacttccataatctgccacatcaaataaaagagtaatccaaccaataaaattgtcagaatcacacctacttcttctgctgtaatggataaaataaagtcggtatacggctctggtaagtaacctcgcttttgcatactattacctagtcctacgccaaataatcccccattgtggattgcataataggagttaactagctgggccccacctttttgctctaattcaaagggatgcaagaacgacattagtcgttggaattgataacttctttgtaaaaatccaggattccaggcaactacaataaaaaatacagctgccactaagatcacaatcccagctaaccaagttaaagctaatttagttggaacccctgatactgaaaacattactaaagtgatcataaataaaattgctgtcccaccaaaatcaggttcaacaataaccaaacacattaaaaaagccgccaaaattgctgggtgtgacaaattatgtttgatcttacccttgactaattttccatctcttctgtctagtacatatgacaaataaatgaccagagccaatttagtaacttctagtggctgcaaattgataaagcccaagttaatccaacctacagcaccattaactgccgcactactgccatgagcaaaacgtagaaatactagccatcctaacataagtatacaaattaataaaaatccccctacaaactttggatttttaaatactttgattcttaatgcaaaaaacggaatcccaaacaaaaagaaagctactatagcatagattgcttgccgtatcccatagacatttggcttaaatccattaactaataaaatatctgaactagctgaatataccaaaattatcccaaccactactaaaataagatagggaataaaaatctggtaattaagataacgtaattttcgacgcacaagcgttgcccctttatctaaataatacttttttcattataaaacaaaaagatcatcacttctatcaagtgacgaccttttaaaatttattaaactatcttagttagcacggttacgcttcttatcagccttttgacgttctgaagtgttcaaaatcttcttacgtaaacgaatagattcgggagttacttcacaatattcatcatcatttaagaattcgatagcttcttcaagagtcaacgttctaggagtcttaatagcagcagcgtggtccttaccggcagcacgagtgttagttaagttcttacccttagttacgttaacagcaatatcacgttcacgtgatgattgtccaacaatcataccttcgtaaacttcaacaccagcaccgatgaataactcaccacgttgttctactgattgaagtgagtaagtagttgattgaccttggttaatggataccaatgcaccattacgacgacctgggttccagttctttactactggcttatatgcttcaaaggtgtggttcatgataccatatccaccagtttgtgacatgaattcattattgtaaccaatcaaaccacgtgatggaactaaaaattcaagacgagtttgaccattaccagttgattccatattcttcatctcaccttttctttgtgaaagtgagtcaataacagaaccaacatattcatctggagtatcgatttgtactgattcaaatggttcgcacatagtaccatcaatttcacggtaaataaccttaggacgtgaaagttgtaattcgaagccttcacgacgaagttcttcaaccaaaattgaaaggtgaagttcaccacgacctgaaacagtccaagcgttcaattgatcagttggttcaaccttcaaagaaacatcggtacgagtttgacgaatcaaacgatcttcaagcttcttaggagttacttgatcaccttcacgacctgcaaatggtgaatcgttggcaacaaagtccatttgaagagttggtggatcaatcttaagaagtggcaatgcttctggatgttcagctgatgcaatagtttcacccacgtagatatcattaataccactaatggcaataatatctccagccttagcttccttaatttcgttacgtttcaagccaaagtaaccaaataacttagtaacacggaagttttgagttgaaccatcacgcttcataacagtgatgttgtcactaactttaaccttaccacggtaaattctaccaacaccgatacgaccaacatagtcatcccaatcaagcatggtgatttggaattgtaatggctcatcagagttgtctactggagcaggaatattcttaataatggtatcaaagattggatccatagtttccttttgagtacttggatctggatcatatgatgaagtaccattcaaagctgatgcataaacaactgggaagtcaagctgttcatcgttggcacctaattcgatgaaaagttcaagtacatcatccaaaaccttcttaggacgagcgcctggacggtcaatcttgtttaaaacaacgataggttttacgccagcttccaaagctttctttaaaacgaaacgagtctgtggcattggaccttcataggcatcaaccaaaagcaatgcaccgtcaaccatgtgcataacacgttctacttccccaccaaagtcagcgtgacctggtgtatccaagatgttgatagtagtatccttatacttaacagcagtgttcttagacaaaatagtaataccgcgttcacgttcaatggcatttgagtccatagcacgatcttccagattcatgtgttctggcaaagtatcagattgcttcaataattggttaaccaaggtagtcttaccgtggtcaacgtgggcaatgatcgcaatgtttcttagatcgtctcttcttttttctgacaaaagtattcctccccactcttcaataaaaaaactgtgactctgtcacagtttcggtaacgcattagcgccttatcgaagtgcttttcttaaatctgtatagttacgttagtgaattttaccacctaactgcatacgggtcaacgcttaacaatcaagttaaccctggatttttttatgcaaaaacaagcaaaaactattaaactatggtaaaaatataatgtagataataattttttaaaaggagtaattattttgatcttaatgaaagatatcgtacgtgacggtgatcccgtcttacgtcaagttgccaagcctttaacatttccacttagtgatcactataaaaaattagctgatgatatgatgcaatacttaattgattcacaagatcctaagattgctgaaaagcaccaattaagagcaggcgttggcctagccgcacctcaagtaggtgaaggtgtacaaatggctgcacttttagttcctgatgatcaaggcaaaattatctttaaagaagtttatgttaacccagagattgtctctgaatctgttcgtcaagcttgtcttagcgaaggtgaaggttgccttagtgttgatgaagttattaatggttacgttccccgccctgataaattaaccattcattactacaccgttgacggtgaagaaaaaaccattcgcttaaaggattacccagcaattgtttcttctcatgaaattgatcacttaaatggtcacttgttctatgaccgcattaataagcaggatccattcgcacttaaagaagatacagtcgtaatttcttaattgttatttaaccaaaacaaaagcctgcagatgcaggcttttttgtataaaaaagtcactggttaactaggccagtgactcatacattgggaattaagaagattgaagagacttcttataacgagcaaatgaatttattaatcatttactacatgattatcgtacaactgatgttattttacgtcaataacattgaccaaatttaatcggtaaaaatcaaaagaaacataattatatacttaactttataattatgataaaatttttatagctattgagtaatttttactctacattgaacgtttatacattaataaggagaatcatttatgatctacaaagttttgtatcaaaaagacaagattgtcaatcctcgtagagaaactacacaaactctttatatggaagcagacaacatggtcgaagcaagaagtatggttgaggacaataccccctataacattgaactcatccaagaattaactggtaattcgttaacttacgaaaaagaacatgctgactttaagttaacaacgttcgacaagaagtaataaagagtgcgaattaaaaataatgaagtagccgtttatgcaatcgggggtttgcatgaaatcggcaaaaatatgtattgtgttcagtatcaggatgaaattatcatcatggactgtggtattaaattccccgaagataacctattaggtattaattacgttatttcagactattcttacctaatcaagaatcgtaagaaaatcaaagctcttgtggttagtcacggacatgaagaccatatcggtggtattccatttttgttagaaaaaattcctgaaattcctgtctatgcgacaccatttgccctttcattaattagaggcaaattggaagaacacggaattttaaagacaactgaactacacgaagagcatgaggatactgttttgaagtttaagaaactttccgtttctttctttagaactactcactctattcctgatactttaggtattgccgttcatacaccactcggtgccgttgtctttactggtgactttaagtttgacttaacaccagtaatggatcaacctgcaccagattttcaaaagatggctcaattaggcaatgaaggtgtacttgctcttctctcagattcaactaatgctgaagtaacacaatttactaagtctgaacgatttgtagctaagtcactacataatatcatcactggaatccacggtagaattatttttgccacttttgcatctaatctttatcgtgtatcaactgctattcaagctgcaattgataccggtagaaaggttgcaatttttggacgtagtatggaaaatggcgttgataatggggtcgacttgggctacttaaatttgcctaaggatctaattgttgacgcagatgagatcaacaaactaccacctgaaaaagtaatgattttatgtactggttctcaaggtgaaccattagccgctttatcgcgaattgctaatggtactcaccgtcaaatcagcttacaacctggtgatacagtcatcttctcctctaacccaattccaggtaacacattaagtgttaaccacttaattaataagttaatggaaggcggagccgatgttattcacggaagagtaaataacgttcatacttccggacacggcggccaagaagagttaaagatgatggttcgcttagttaagcctaagtacatgattcctgttcatggtgagtacagaatgcaggttattcacacccagcttgctcaacaagccggtgtacccgctgaaaacacttttgttttatctaatggtgaagttgtctgctttggccctgatggcgctagaatcgcaggacatattcctgcaggtgacgtttacgttgatacttctggtactgcagatgttggcaacgttgttgttcatgatcgtcaaattctttctgaagaaggtttagttgttgcagttgctacagttgattataagcacaagcgagtcttagctggtcctgatattctcagtcgcggatttgtctacatgcgtgaatcaactgagttaattagtcaagcgcaaaagcatgtttatcatgtgcttagaaatgaaatggctaaatcaaatagaccaaaagaaagtgacattaaaaaggcgatcaccgaaaatctttcagacttcttgtattccaagactgaacgacggcctatgattttaccaatcattatcgaaaagaaatagtaaaaaagactccttagggagtcttttattttagaaaataaataatatgcataaaaaaattaaagttcagttattagttaatgaggtcgctgggaatggcaatgctattaaagctgataaagaattacaagatatactaaaagaaatgaatattccttttaagcgacaaaaaagtcattatcctggagaattagtcgttctagcacaaaattacgctaatttacatctctcttctgaacatgttttaatcgtagttggtggagatggctcctttaatgaagttttaaatggaataaagacttctaattatcctgagacagctattacttatttgcctgcaggaacaggcaacgattttgcccgtggtgctggattaaccgcagatcccaggcaattaatcaacaatttgctccgagatcctgaaccggaacaagttgattgtggttttttcacatcaaatattaaacaaattcctaagggttactttgttaataatttcggtattggttttgatgcctttgttgttcatcagagtaatcatgagcaattaaaaaaacacctcaatcacctcaattctggaaatatgatttatggcctaaatataatcaaggcactaattaagcaggatacctttacagtgactgttaaaactaaaaacgaaactcttcgttacggagatgcatactttgtcactactactaaccatccctactttggcggtggttttgctattttgccaaaagcggacatttacagtcaccatcttgatacagtaattgttgaaaaaccgagtttacgcaagtttctctggctttttggtaagctgatcaaagatggttcacacgttaatgcaccagaatttcattatattgaagctaaagaaatcctagttcaaaccaataaaagtgaatatgctcaaattgatggtgaagatattgaaaagcagcccttcaaagtaacatttaaagctgatcattttaatttattaaaataaggaagaattccaaattcttccttttttatatcttatctaaaatatctcttttcgaattatgattttgataatattggtcctgatcaacgaaatcatgtacttgatcataaaatttcttccaataacggtatttttgatactgcttttgccactcccgtgcttcctgcaagtaattaccaagaagtccattaatctgatcgatatgtttaatcacctgattagcatgatacaattgctcttccacctgcttttgagttaacgttgactcctgatcttcaaaaaatagaacattttcttgataatttttttcttcttgcaattgtttactattgtccatttcttctttgatagctgcaatttcgtctggctgtaatccaattccagttttagctttgactaataacgactgaatatctgccaattgcacaacatctattttcattttttgataacggttcgaatcagtcaatgtgaactcatcatctgttctacttacaaatacaaccacgtttctgattaattgatctatatttggcaagcgtctcaataaattaataatcactgggttgttgcttttttctaggacatatttaatactttctttatgcttggccacttgatcggctatctgatcataatcagcctgcacattatactgtccatttttacttgttcgtgctttggtttccaagcaaaaaatcccgctagtcgtaattatcacatgatcaatttggttactccctaaactattctttttttcatagggatatggtaacagtaaattatgaattatttctttccctgtctgcacttcacgtaaacgagaattcactaattcttctgcggcagcgcctgccaagagattgctaagatggcgcaaatcacgttgagataaaatattcataggtcgcaaatgttttatttgattcaaatgtagttcagtcattcttttctgaaatgcgtttactttttgattgtaaaccttatagccagaattaattgcccgaattcgtaaaacattttgcagagccaaagctcgtttcaaatcacgtttattattcaacaaagttttttcaactatcatagcatcatgaacagtctgtgaatcagttacttttttatgtgtaatccaagctttttgataactagcatgattttctaactcattcacatactgatttaagtcattttccaaaggcaaaattttgtttctaccttctttgactattgagccataatagcgcaaattttttgtaatttcgtctaactcattgaattcatgtttgccataatggtaagttaccttagtttctccattccaactagtcttacgccaataatgaccatccgtctcaccaaattcaactaattccgccactgaacgatctaaatagtacttaatcaaataatgacaatggcctttattgtcaaaaatgcgtcgcttaatataacccggtcgcattaattcaatgatctgaaaggtcaagttcttatgattaggaaaacggtatggtaatcttttgcctgcaattttttcaattttagttatttctttcttatctgttacagataattctatttttttcattttcttcttttttcgcttttgaaaaaaataataggttaataagcctattgttagtgtaattattgtaatatccatgttaattatccatattttggaacgtatgtttagacaacaataattataccatgattttgtataatgaaaaagccccttgttttaacaattcaaggggcttttatccttataatttgatattttccattccaatcattggatcaatttcaccagaatatattttttccgaggttagaacaaaatcttctgctacttctgctttatcggtttcattctccatttcttgagctttttcgtgctgcttgctttgatcagatttatccaatgattttgtaatacccaattgctgacaaatcttcgctgctaagccagtcttacgatcatttcccggcgtcttaaaagctgccacaaatgcccgtggatcaccaactaacactaagtttttctcagctcgcgttattgcagtatacaaaaggtttcgttttagcatcacaaaattctgcatggttagattcaagatcaccaatggaaattctgaaccttgtgatttatgaatagtgattgcataagcccgggtcagatcatttaaatcttttctagaaaaggcaacttctcttccatcaaaatctgcaatcatgcattccttggcatcatcttcatcaatgctaatgatcttaccaatttgtccattataaatatctttttcaggattattttgcaattgcagaatacgatcgccaattcggaaaacttcattatgtgcttctaataccttacttttaggctgagatgggtttaaaattacctgaataacattattaagattagttacaccaccattgccaagatacatcgcgctaagcacttgaatatcatcttttgcaaatccacgttttaaagcaagtttaacaatttgtccaactgcatcccctactaattcgggacgacagctaataaaagaataattatttgttttcttaaacaatgcttgcggatctttaccctcattaacatcatgcgccaaagtaataatcgttgaatcatcaccctgtctatgaatctgcttcaaaatagtagttggaaacgcttgcgatttaatcaggtcactgaagacattgccagctccaaccgaaggtaactgatccttatcaccaacgaaaacaatatgccgcgtatcatgaatacttgccaaaagttgtttaaaaaggaacatgtcaaccatcgacatttcatcaacaattaagatttcaccatttaactcattcaagtcctgagtgttagtatcaccaatacctaaccccaacattcggtgaattgttttagcactgattccggtaatttcacccattcttttagctgcacgtccagtcggtgctgctagtaaaaacggaggatcttcactgtaaagagcggaggaaggaatctcagccagcttgcgtaatactaataaaattccattaatgatagtagttttacctgtacctggtccacctgtcaaaatagaaatcggttggttaactgcgtttttgatggccaacttctgtgtatcgtcgtagtgaatcttaagttccttttcagcatccttgattgcttgctctacctttttatcatcatattgttctctttttttatcttcttttttttctaccaagtttttcatcaagcgagcaatatcaacttctgtttgataaatattttgtagagcagcattctcaccatcaactattactttgccagcttcttgtaaactattaatacagctagcaattgggtcgaattgattgatttgaagcaatttacttgcttctgttaataactcagctaagcctacataagtatctccctcaccatttaaagcatcgagtaatacttgataaacagcacctttaattctacgtggatcatcactagcaatatctaattggcttcccatcatatccgcggttttaaatgcaaaacccgaaatatcattaactgctgcataaggatctttctctagttttgctaatgcttcaccatgataaagctggtaaacccgtcctgcaatacgcttattaatgccgtatttagccaattttaaaattacttctgaataagaatccatcgcatttagtcctgccaaaagactatccttttgctttctagttaaagaaagcttatcaatcttagctggactttccttcaatacatctaaggcatttagccctaattcatcaataatcgtagtcgcagcctttttaccaattccagggaacttattcgaactcaaatacttagttaaagatccctcttcatgtggcaatacttgcttatagttatttgctctaaactgcaagccaaatttttcatgcattactagtttaccctcgaagcgatagctactattaatttgaatatcgccaaaattccctgtcaccttaatatcgggacgagaataatctgataaagtgccgataatttcaacgtcaagaattttatacaagtctttactattttcaaaaacaatcccgttaaccttaccggtaaattcattcataatttttcttttccttgtcatttagcatcttcataattgaagcatactgattcattgcttgttgataatacttagcatccatctgcttagcttgagcaaaatatttttgagcctggtcacgacctttttctaatgtagtgacacctagtaaaaaataaactttcgcatttttcttattatcaggaattgccaaatacatttgctgagcctgttgattctcacccaaacttaaccaaatatcgcctagcaattcctgaattcgctcatcaatttttttgatcgtcaaagcataagctaaagctttttggccttgccctaattttaagtaagttagtgccttttgataaagagttaagtcatcattaggtatctgatctaataaagccagtgccttatcaaaatcgccttgcatgtaataacacactgccagattataatttaattcttgtggctctttaaccagatgctgggcctgctccaatagcttctgtgcttgatccaagcttccttgctcaattaaatacgtcgatagctgcaaataattagcaacttgttgtggatgctgatcgatttttttgattaaaagatgaatggcttgttctactttaccttcatcataaagttgcgctattttttgatccattataacgagtccgtcttcgataatttacgtcctaaataactagtttcattccacactaccggtttaaaagtctttccgccatctagtgtttctaagacagttaaagaggtattgctaaggccgccatttttgcgaatatctttcaatggatagcctaaaagtccacccataatagctgataatgccgcaccatgactaactgctagaatcttatcatcatcgtcaggaaatctttgtgccatttcttgagcaaatgcttttccacgagcaataacatgtggataatcctcaccatgaagttcagtcggatcatatttatctggatggtgccaaaaattatccatttgtttagggaattttttctctgcatccccaaacttcattccctccatatcgcccaaattaaactctctgagtcgttcatcgatcacaacaggtaagttagcgttcattgcatcatcgatgccctgagcggtattaaaggcccgatcaagcggactggcaaaaattcctctaaatttagttccttgcaagtgatgacctaatttttttatatcttctaagctttgtggcaaaagtggtgaatctccatgtcctccttggaagcgactagctaaattccactcagttttgccatgacgaacaaaataaatttgcattgcttaaatccccctaattgtctaatcaataagaatagtttagcacaaagaaaaaggcgttcgaaaatgatccgtaccgtgtcaagtagacagcttaaatatataaattaatttgattaatcagttcgctattgtgcgagctgatttttcttttcatcaatctttttccaaaagtctttatatcttttatcttgttttattggatatgaaattatattctctggattattcttagcttcttttctaacctgacctgcgctcttgccattgaagcgctcctgaggatcataattaatatagtattcaatacttgctttaaaggctttttccatctcttcatagctatttgccttcggataaagaacttctcgcatttctttaattaaaccttgccagccttccattgggccattatcaatacagcggccaattctagacattgattgtggcatgccatgttcttctagctcatgcttaaaaggcatcctggtaaattgaaatcctcgatcactatgaagcattgcatgactattgggctctcttttccaagcagttgacagagcagcgttaactagggctgtatcattgcgcttgcttaaagcatagccaacagggaaacgatcatatagatcaaagatagtacagagataaatcttttgacttgttccaggaattttttcttcagtaatgtcagtgcaccatttttcattgggtttagtggcattgaagtctctatgcaatagattttcggcagtttcttccggtctagcagcttgatagcgatacctcttattaaatctggccttgctagtatagatgccattcacgcacatcaagcgagccacagttctacggtatattttggcctcaccgtctgctagctcattgtttaaagccaaagtcatcttaggagaaccaaagaggctgttattgctctcagctatttctttaatacgcttaagaatcttttgatctcttagttcacgtttgcttggcttatgattaagccatttgtagtaggctgaccgggcaatattggcttgtttgcacatccattcaattgaccacttatattctcggtgacattctttgatcaaactgtaaagagaatttcgctgctgttgtttaagtgctatttgtctttgttttggctgtccagcaaacacatcctttctaattccttcactttttttaggaaggctatctcttggtctttaatatcattttcttttttaagctgttcaatttcacgctttagcctttgagtttcagatagctcagcttcttttaaacgatgaccgcgcctatctgctaagccgtcagttccctttgcgctgtatttttttgaccagttgtatacttgggcatagctgcagccaaatttaagagctgcttccttgtagttccattgatgatccttgcagtatttcactatctgtttacgttcttctagggttgtcttttttctcttagtcatataagcctccagaataggattgtagtccttgagttcttgatgactattatacttgataacccactgctttaactgtgcagcacttcgcaaaccaaacttatttgttagataatcatatgagccttcgccatttaaataggcagctatgcatttgagtttaaaatctttactgtatctttgattatatttatgtggtcttaatgcttctggcccatgatctttaaatgcatatacccattggcgcagtgtagtcttgccagcccctaaaactttcgcaattgaagcaggtgatgcttcgccacttatgtattgtttaactgctttaagcttagcttcatagctaaatttactttttctagacatacaaaaagtcctgctttcatagatagtacaattttatatatttgtactgtctactaaagtaggactatatcaaatcgaacgctctttttgcatattttttaaactaattgtaattgcttttcttcttggtaagcagcatcaatattaccgccgcctaaacattcttcacccttgtataaaacaagtgcttgacctggtgtaactgcacgagctggctcatcaaagtaaacatcagcagtattgtctgcggcatgatacttaacagtcacgccgatatcacattgacgataacggaactttgcagtacagtgcatctcaaaatcatgatctggcttaccagtaaagaatgacatatcacttgccttcaagcgactagcatatagaagtggactatcatagccctgctctacaattaattcattcttcttaagatccttgccgaccacgaaccatggatcagttgattccttagttgagcccaagcccaagccctgtctttgaccaatggtgtagtacattaaaccagcatgctcaccaactaccttaccatcaggagtgaccatcttacctgatttagctggtaagaattcacttaaaaactttctaaagtttctctcaccaataaagcagatacctgtagaatcttttttcttcgcggtagctaaaccattagccaaagcaatctctctaacttgtggcttagttaggttagctagagggaaaataaccttactaatctgctcttgactcaattggctcaaaaagtacgtctggtccttgttaccatccttaggacgcatcatatgagtaacaccattggtatccttaacagtcttagcatagtgccccattgcaatgtagtcagcatccaagtccatcgcaaactccaagaacgacttgaacttaatctgactattgcacattacatcaggattaggggttcttcccttcttgtattcatccaagaaatattcaaaaacgcggtgccaatactctttttcaaaattaattgaataatatggaataccaatcttatcggcaaccttttttacatcttcatagtcttcagtagctgtacagacgcctgaatcatcggtatcatcccaattcttcataaagacaccaacaacatcgtagccttgttgtttaagtaaaagtgctgaaacagacgagtcaacgccaccactcatacctacaactactctagtcttgctattgtcaaccattattcaatcaatcctttacttcaagcaaaatcttacgctcctcaagatcctttaaaatataatctaaaagttctacagtaggagctaattgcttatttttaaaaatattaaccttctgcaaaccgttgcgatcagtaataaccatagttaaatgcgacaagtccttattaatggtcatctttaacttagtaggcgcgttataaggtgaatcattgtaaaggggatgttcataattaaaattacccttagctgtcttcacaaagccagcatcaatcaaagcatagagcttcaactcaggattcaaagtaaacttacgtttatcaccattaatcacaactgtatttgccataattttcctcacttatttataataagatactttctttttgaaagcaactatttatttttagattgaattctttgtacaatttttactaattcttgagcgaattgctcaatttcttcatccgtattataacgcccaaatgaaattcggatcgactcatttattcttggtgaattttctccaaaacaagcaattaaaacatgtgatggctccaaagaaccagcagtacatgctgaaccgcctgacacggcaaatccattcaaatcaagatttgtttgtaaagaagtagtagatacaccattgagatgcagattaagcacatgatgtgagtaacccggaccatacccaccattaattccataattaatttgatgatcgtctaattcctttaaaataatgtcttgataatgagcatatttcttttgcaaagcatcacgaccaatctcggatacttcacggacagcttcgccaaagccggcaattcctggtacattctctgttccagctcgacgtttggtttcctgctcaccgcctaaaatcaaatttggaatatcgatatccgcattttcatataaaaagcctaaaaacttaggtccattaattttatgtgcagaaacagacagaaaatcaatgttcatgtccttaacatcaattttaattgtgcccattccctgaacattgtcaacatgaaaatatgcattggagtcctttaccattgccccgatttctttgagcggcataatggtaccaacttcattgttaacggccataatcgatactaaaatagtgtctggcgttaattccttttttaactgttctaaagaaatttgcccgttttcatcgacattcaaatagacaatgttgtagccctcattttccaaacgtttcattggattaagaaccgagggatgttcgatcggcgtagtaataatctttttaccaatatttttacgagcataggcagttccaagaatcgctgtattattgctttctgaaccacctgaagtaaaaataatctctccatcttgagcattaatatcttgagcaatctggtgacgagctcgatcaattacatttctggccctacgacctaattcataggtactagaggcattaccaaaatcatttttcatttcatctgtaataatatcaattaccttgggtgacattggtgtcgttgccgcattatctaaataaatttcacgcacgtttaattcatcttttctacataatcactaattaacttagctgccttagcgccgacttccttgacaaacttgtcaaaatcattgtctgcattagcatccccattatcggaaattgcacgcatagcaaccaacggagttttaaaatgacgagcaacttgtgcaaaagcggctccttccatttctactcctaaagcttctggaaagtttttcttgattaactctttttgttcttctgattgaacaaaagtatctccagtaacaacaagcccttccttaaaatctacgtcttcttcacctaaatatttcttaaatgcttccctttcaggcgaattcaacttaaaggtagcaggctctcttggaatctgaccttctacatattcaccggcactaacacagtgagcatcgtgataggcaaaatcatttactaaaatcacatctttacgatgaacatcatcttgtaatgatccagcagaaccagtcataaaaattacatcaattttttctttagttagtaaactagtcagattcatagcggcattcactttaccgataccacttaaacctaaatatacatcattgccattaacagaaaaatgttcgaattctgttgatccgaacatttcttttgtttctgcatggaaatgatcacgataaaattcagcttcttccgccattgggacgataatcgcaatcttcaatttatttcctcatttccactataaatgaaatagtgctaatagcaccaatataattaaaacaatcactatcaggatagcacgattcaatctttttttcagtcttaaagacttctcttggcgaatcgtttccttatcactcgattgattatgctgataaaattcttgtccatccccagccagagggcgtcttctaggttcttcttcagagtcatcccgcttaaagtcaggatttacatctacttcttctgaatcattatcagaaaaggaagattttagcttactaagtaggctttttttctgccttttacgataatcagagcgtttttctaccataactaatccttattatcggtctgagcattacgcaacatcatattctcccaaacagtaattgcataaattgtctttgcatcaacaatttttccttcagccaataaagtttttaattcatctaagctataccaactagaagttaaaaattcatctgcatccagtgcccgcttatcagtcaatttagttaaggtatcacaatagaaaagatacatcttttcatcacaaaaaccaggagaagaatagaattcactgaccttttcccagtaatctgcgcgatagccaccttcttcattcagctcacgcttcattgcatcaagcggacttgcatcagtggaatcaaccaaaccagctggaatttccaaagtaatctgcttaattggttcccgccattgctttactaacaacatcttttgttcatcattaattgcaataacagccgatgcaggcttatgcttaataacttctctagttgcagtttcaccattaggaagcttaattgtacgaacagccagatccaaaatacgtccttgaaaaatctgctgtgacgagatttctgtttcctttaaatccaaaatcccagctcctttttaggctaaataaacatttacacattgcagaccatttttaccttgagctaactgatatttaactctttgacctacttgcaaagttttatagccttcctctttaattgctttatagaagacaaaatatgacttatgattacgatcatcttcaataaagccatagctactgccttcatcaaattgttctacagtacctaaccgcattagttttcaaatccttcttgaacagcttctgggtaatctgcttcaacgattttagcacaacgaccacaaagcattggcaactttggatctacgccaatatcagttctaatcatccgacaacgaggacatacttcgccttcagcatgttcaactactacactagcattattcaattgctctgcattatcaggtgcttcaccatcagcaatagttaacttagatacaattagaatttgtctgaaatcagcatccaagtcttggagcattgccttagtttccttatctgggtaaatagttactgttgcttcaaacgatttaccaattaacttcttatttcttgcatcttctagagccttcaagacgtcattacgcaacttcatgaatttaccccaattttcaagcaaatcatcatggttagcatattcttcaacttctggcatattagcaagttgaacgtaatcttcaggttctttcaagaagccccaaatttcttccatagtgtgtggcaaaattggtgttaagatcttagccaatttaacagcagcgtcgtaaataacagtttgcattgagcgacgatcatggctgttttcaccatcaatgtaaagtacatccttagcaaaatcaagataaaatgcagaaagatcattagaaacaaagttgaagaccttcttgaagacagtagtaaaatcaaacttgtcgtaagcagcaagacagtctttaactaagtcatttaatttcacttccatgtattgatcaactgaacgaagatcagcataagcaacgcgattttcttttggatcaaaatcactagtgttggccaacatgtaacggaaggtatttctgatcttacggtaactttctgcagactgctgcaaaattcccattgagactgcaacatcagaagtagtatcagcttgagctacccaaagacgaataatttcagcacccatcttcttaattacatcgtttggtgaaattacattgccaagtgacttagacatcttgtgtcccttatcatcaagcacaaagccttgtgataatacttctttataaggtgccttaccagttactgcaacagacgtaatcaaactcgaattgaaccaaccacggtattggtcactaccttcaagataaagatcagctggatagtgtaaaccatcacgtttttccattacgcctgaccaagatgaaccagagtcgaaccaaacatcaagaatatctttttctttagtaaactcgccatttggtgaatgttctgaagtaaagccttctggcaacagttccttagctgtatgagtgtaccaagcatttgaaccttctttttcaaagatcttggcaatatggtcaatcgtttctggagtaacaattggggtaccgtcttctgcatagaagatcggcaatggtacaccccaagcacgctgacgagaaattacccagtcgccacgatctttaatcatgttgtaaagacgagtcttcccccatgaaggaataaagttagcttgttcaatttgatccagaatttgatctctaaacttagaaattgaagcaaaccattgagtagttgctctgaagacaacgggcttcttagtacgccaatcatgtgggtatgagtgagtaaagaagcttaacttgagcaaagcgccagcctttttaagcttatctgctaccaccttgttagcatcatcatagaacattcctacaagatctggatctggaatatctttagtaaagcgaccttgtgcgtccattggactgaagaccgggataccatacttttgaccaacacggtagtcatcttcaccaaaaccagtagcgttgtgaactaagccggtaccgtcatcatcagtaacataggtgtcattcattaccaaaccatattggcctacaccagtcttaccataaaggggatgcttataagtcatcccatcaaaatcagtaccttttaattgtttaagtactttgtagtccttccagcctaagtcttctgcaatggctggcaaacgatctgaaccaattacatacttcttaccgtcaacttctactaaggagtagtcaaatcttggattaacggtaatacccacgttacttggaatagtccaaggagtagtagtccaaattactaatgaaacatctgaatctaagatacctttaccatctttaattggaaaagcaacataaattctaggtgatttaatatcatggtattctacttcagcttcagctaaagtggattcacttgaccatgaccagtaaactggcttcaagcccttataaatataaccttttttatacatttctccaaagacgcgaatttcttgtgcttcaaagtcatgttgcaaggtaatatatggattatcccaatctgccataacgcctagacgcttaaagtcggccatttgcttttgaacttgttcttcagcatattgtcgacaaagctcgcgatacttagcacgatccattgtcttacggtcaacgccttgcttagctaattgttgttcaactggaagaccatgagtatcccaacctggtacatatggtgcataataaccgttcatattcttgtagcgaacaatgatgtctttagaaatcttgttcaacgcatgtcccatatgaatattaccattagcaaatggagggccatcatgtaaatcaaaacgaggcttaccttcgtttaactttaatctttgttcatataacttgttatcttcccattctttttgccattcagcttcacgaacaggtagattaccgcgcatcttaaatttagttttacctaaattaagggtatctttgattctcattaacaaaattcctttctaaaaaagaaagcctcatcctaaaattaggacgaggctaaccgtggtaccacctaaattgaacttattataagttccacttaactttgcgtaacgtgcaaataccgtttagattaattaggcagctgatcagctcttaggctcttatgctagtcttccaccatcactagctcgctgaattgccttcaagctttactgtcaatctaatatgcttattttttatagtcgtcaggaaaaacaattgttgggcctaaaggatctgatttcatttcaggcttaacattaattgtttcatgacttggactgtccccggtcattggtttaggtgcagcattttcttcattatctgcatcgtcagaatcatccggttgatccaactccaaatcatcagggccttgagaagagtttacgtcattttcatcatcattgtcaacatcttcatcttcaacgtcttcatcatcagcacttactggctccaaaccatcatctggataataacgctctaagttgaagtaatcatccaatgcatgttgccacttttcatcattcaaattatcgatttcagtctgtagcatttcttgaatattactacgaaattcactaacttgctcttttacacgcatataatccgtagaaatagtatcttgttgatgcttttggaagttaatattatcttccgcttgctttttggcatccgcaataatctgcttagcctctgcttctgctttctctctaatttcatcagcagtttgttgtgccgaaattaatgatttatttaaagaacgctttttttcgttatattcattaacttgatcttgataatcatctactttttcttgtaaatcagttaactttttatttaaagaaactacttcattcttcaagtcaaccacttgatcaagtgtatcaccataatcatcaacaatctgatctaagaagctatctacttcaagacgatcatatccattacgaccacgccgtttaaattccttgttgtgaatatccatcggggtcaattgtgtttctttgtctgccaaagtctgagcaccaccttatatttaccttttcttgtagtcgaaacatcctcaatcaaaatccgaccaaagtgtcttaaactcaagacatcgtcttctttaatcattatattagaatctgctatttcatgccaatttaatttaaccagctgactattaatcatcttttgaatttgaccgcggctttgtctgctaatacccgataatacagcatcaattcgcattgaggcaactattttcgttttttcaatcgaatcatcctcaggaaccaaaacttctttgaagctaatcggtctcagctttacttttgctctgccaatgcggtcaatttgctcttcaaaaaattccgttatttcttttttagtgaaaaactgccattttccttgattatcattaataatatcgccaaaaatacttgtatcaatacccgaattcgccaaggtgcctaaaataacactataatttattttagtaaatttttgcggatattcaatttcatacggctgaatctgataatcactcggtcgcagattaagccattcttcacttaaataaactcgctttttctctgcattaggatagccaccatactcttgaacaaatgcatcattaccaacaattgttcttaaaattgctcgttttcccggatccaaaaaatcagtcaaaattggctcatgcttaaaaatcagctgattaaaaagaccagtaaaatagtcaattactggtctttcctcttgattaaaatgtgggtaaaacttacttgcctgtctgcgttccattacaccatcatcctcaataaaatatcaaatatccatcttaaaacatagttttgaatgaaatataagataaataaagcaataattggcgagacatcaattccagttgaataagctaatctcgcaaatggaccttttcgaaacaaatttaaatatggatttacaaccttgtctaaaaagcgaccaacaacagaattacttagcattggtagccaactcataattgcatcaatcacgatcagcagactataaagccataaaatccacgtcagtgccaagtagattaaatttaatatattaaccattagcttaaattgtctttcttatccactaaatcactaattttgccatcagtaacaaactttggtggagttgctaaaaagattttatcaccaatacgttggatttcaccatttaatgcatatacagtacccgtgatgaaatcaacaatccgacgtgctgaactgtcttccattctgctaaaattaatcactactgctttattatttaataaattttgtgcaacatccttagcatcggaatatacccgtggttcatataaaacaatcttgcttttagccgaattcaagcctgatttaattgaaaccacattatcgcgattaactgagttcagaggcaagtcttcattttcatttttagtctgtgaggcatattcttcgtcattttctaattcatcatcattagaaattccgaaaaatcttcctaatttatcaaaagccatttatactacctccaaaactagttttcactacgatgtttaaaaaatggaatatcactgttatcatcactatcgtcctgagcgctagtttcaatttgagaaatactatcctggtcttcatcactaaaagtatcaaaaccctcataatctttcttaggctcagtaggttgggtatttcttctttgattgtcttcgctatcatttagtccccaaacactggttggatcaaccatcgtttgcttaggctgctcaggttcttgtttttcggcagcaggctgaactgtttgtggtcgatcaactggttgcttaggttcttcagccttaggagcttcttctttttctttaactggttgagccttaatttgttggctacgacctggtaattgcttagaagcagcttcttcagccttagaatcaattccagtagcgattacagttactaccacctcatcgcccaagttaggattaattgaagtaccgaaaataatgtttacatcgtcaccagcagccttagaaacaatctctgaagcatcttgagcctcaaataatgtaaggtcaggtccaccagtaatgttaagtaacacttgcttagcaccatcaatagaaacttctaataatggtgaagaaatcgccagcttagtagcttcaactgttctattttcaccgctagcacggccaattcccattaaagctgcaccttgattttccattacagtcttcacatcagcaaagtccaagtttacgtagtcagttgaagtaatcaaatcagaaataccttgaacaccttgcttcaagacattatcagcttccttgaaggcatccatcataggagtcttcttgtcaaccatttcaagcaaacgattgttagctataataaccaaagtatcaacatattgctttagctgagtaataccttctgcagcgtttttagagcgcttagggccttcaaaactgaatggacgtgtaactacgcctacagttaatgcgcccgtctcacgcgcaatttttgccactacaggagccgcaccagtaccggtaccgccacccataccagcagtaataaagatcatatctgcacccttaagtgcatcttcaatcgtttgttcactctcttctgcagctttttgtcctacttcaggatgtgaaccagcacccaacccacgggtcaacttaggccctagttgaatcttgttttcagctttgttgctgttcaaagcctgaacatcagtgtttgctgcaataaaagaaacaccttgtacgccatcgtcaatcattcggttaacagcattgccgccggcaccaccaacaccaattactttgatgacagcattcttattgtcgtctgaatcgaatgtaaaatccattaaattaaccacctttaatcaaagaatttcttaaagaaactcttcaagctattagttttttcttgcttagtattattttcatcgtctggcacagattctgttctggcagacattttgcttctattataagcttctttagcttcactttcactattagaagtcgtacttttagaaatcttggtactttttggctgagaaacggggtcttccacagcgggttcaccaaaaccatagattacgccattaacaagatagtcaacttcagacatcttatatgaatagtggacgataccataagcagctgtataaatcggattacgcataccaatttgatctggttcataaattcgggccttaacatttaacccattagcagtcagactatcaattccttgtaataggctactaccacctgtaatcacaataccacctggttgcttcaatgcattatgcttaactaaaccttttcctaaacgagtcaaaatttgttctaagcgtgcattaataatttcactaagatatacttcgtcaaccatttgctgactatttgcaccaacactattaatagcaaatttatcgttttttgaggcaaattgtggatccgcaaatccatagtccaacttaatttgttcagcatcctttttcgaaatacttaaaacagcagagatatcattagtaatatcgcttccgccttctaaatcgatgttggcatacttaatttggccatctttaataacagttgccgtacttacgccaccaccaagatcgataattaccgaaccaaaagttttttcactttcattcaatgctacacttgaaattgctaaaggcgttggcacaaagaaattattatgataaccggctctttcaatagccttcttgatattgtgcaaaggactagtaggtgcagttaataaaattccactaacacccaaggaacgtgcaatcatttttcttggatcatcaacttcagttttaccatcaatcaaaaagcgactcggcaaaaatgtaattgcttcacgatcatccttagctgctgaatgaatcgcagatctaatcgttctttttacatcatcattatttacttcttgcccttgttcaccaacattagcaaaaccagttgcagtttccagttgtaacatccctaccggaattcctgtaactacactataaatcttggcgtttgttttttctgctacaccttttaatgcacgactaattgcactagcagtttgatcaatatctactatttgaccgtgtcgcattcctgaatttggcgttgtaactgcaccgataaccttaccagaatctgcaacaacggcttttacacttgtggttcctatatctaaacccactaaaagatttgaattctccaaaattaagcccccattaatatttgccttgaaaaaattctaacataaataaacttgcaaaacagctacgatatgccataagctttcttttcactagaagttaatggtctactaaatgcacctatttctaaatcaataaggctatgtttaccagctttaattctaatagtatcataatattttagtttgctattcaaagtagcagtattgccaatcactacattaccgtccttcattactaaaataatttgtgaatttcgtctggtattcccacttaataattttacctgatttttaaatgaattaggtaaactgttaaataactttaaatcattttttaactcatctgatttattatagccaacaaaaataggtttatcttggttcacttttgtccaaggtagagctctcgtacctatttttccattatccaaaatctttcggtaagaataaccatcttttaagtaacccacggttttacgttcattaatttgtaaaatcaattgattaatatgacctaaatgaacttgtgcactttgaatttctggatatttttgggataatctttgactcaaatctttttgttgaaacaagtaatcaaaaactttatcgctagccttgatcttggataccttaacaatttctttagcaggtaaatgctctgcaccaattattttaacagtactgatattcgctaaaggtgaaatatagtatcctaaaccagctatcgccaaaactgaaaccgtcattatcagacctagcctacgtcgtaatgatcgtcgtctttctgcctgtaaatttgagagtgaggcagaaatcttggtctgcgattttcgactattcctttgttggttaaattcatgattcaagtacggagacaattctttccttggatcaatcttagttactggctttttggccatctgcctcacctacctcctagcgtgaaatttcttccatcaccttaatcacttgatcagatgcatcaggtacgcctaaagccttagaagctttgctcatttcagtagcatacttttcatcgagcaaaatatggtcaattgaagagacaaaattatttggatttaaatcatcttctggaataaccaatgctgcaccagctttttctaaatcaagcgcattcttcatttgatgattatgagttacattagggcttggaatcaaaataacgggtacacctaatgcagtaaattctgcaatacttgttgcaccagatcttgaaacaacacaagtcatttctggcaatagacctggcatgtttttaatgtatggcaaaactttaatattattaccaatatcaacattcttaattttttcttgtaccttatcaaaataaaaagtacctgttgcccaaataatttgatatggtttttgctttagcgtcattaatgacttaagcataattctgttaattgctaatgctccacgggatccaccaaatactaaaacagttggcatttttggatttaatccccatgttttttcaagatcaattttttcttcgtgcaagcttaaaacttgttgtgaccgtggattacctgtcttaactagtttcttcttttctgagaattcctttgcagcatcatcaaatgtataacaaattttatccacataatgacccaaaaatttattagctaatccaaccactgaattagattcatgaatcattgttggaatatgcattttagctgcttcataaaccatagcaccgctaacgtaaccacctgtacctaaaatgacatctggtttaaagtcccgtaaaatttggcgtgcgcttttagtagcttgtaaaaatagcttgatagtctcaaagttttttaacggatgtttacggttaaagccttgaatcttaattgttttaaagttaacaccggctgctggaacaatttttgattccaatcctttttgtgtacctacaaataagatttcatcgtttttactaataccgcgttctttcaaacgttcaataattgccataattgggtaaatgtgaccgcctgtaccgccacctgtaaaaataactctcattttatttagtctttaattcctcaacaaatctaacaaagtaatcgccacgttcttcaaatgttctaaattgatcccaagaagcacatgctggtgagaacaatagtacatcgcctggttcaactaattcccaagcacgaggaacggcctcttgtagtgtattaacaattacaatgtccttaattcctgcttttctagctgcgtcagctaacaaatatctagtttcaccataaagaacaattgacttaacatgttttttaaataatggtaccaaatcatcaaaagtgaagccacggtctaacccaccagcaatcaatacttccggttgcttaaatgatggaatagctacagttgctgcttcaatattagttgacttagaatcattataaaccttgcagccatcaagtgttgttacatattgcaaacgatgcttagcgccagtaaaggtgctcaatactgcggcgatatcatcattatcagcgcccataattttagaaattgcaatagcgactaaactattttgcaaattatgaatacctggtaatttaatatcagaaatcttcataatcttttcgttttgactttcaagatattcatcgccaatgaaataatcagcattatgatctgtctcagaaaaagtttgcattttagctggtgaaacttctttttccttagccaaaatatctttttgatcataattagcaataaagtaatcattactgttttgcgttctagttacattcaactttgcattgacataattttcaaaagtcttgtgataatctaagtggacgttgttgtaaatatcaacgatcgctgcaactttaggatcaatatcagttacacccaaaagctggaaactagaaatttcaactactaaaatatcatccttagttgccttaggtacaacttcagaaatcggtacgccaatattaccaactgcataagcatgatgaccagatttttgcaaatgatggtccaaaattctttgtgtcagcattaccgtagtagtttttccatttgaaccagtcacacaaacatagggagcatcactacaacttaaggcaacttctggttcagtaataatcgggatattcaactcctcagctttttgaaccatcggattttcatagggaatacctggatttttaactaaataatcaaaatgttctttttcaagcaaatcaactggatgatgaccgccaattacgcgcacgccgcgacttttcaattcttgtgccttagcatttttctccaaatcagctttatcatttaaagttaaatttgctcctaattgcaaaaggagttcgctaacagcaaaaccacttttacccaagcctagaaccaaaatgtttttattattataagttttaatatccttcattttatgattatccccaaattactaaatacaaaatactgccaattaatccaactaaccagaagacaatatctactttccattctgaccaacccaacatttcaaagtggtgatggataggtgtcatcttaaaaatacgcttacccgtagtttggaaagaaattacttgtaaaattacactagcagtttcacaaacaaaaacaatcccaactaacaataatgaccagggacggttaagcataatactgattgttgctaaaccgccacctaaagcaagtgagccagcatcacccatgaaaattttagccggcttatggttaaaaataaagaaggcaattaaaccaccaattacactcatacaaaaggccaaaacagcaaaattcttttgtttgaatgcgatataggcatatgtaccatatgctacaactgataaacctgttgctaaaccatcaagaccatcggacaagttaacagcatttgaaaaaccaaccagccaaaaaataataaatgccacaaataaaactaagctatggacaaccccagcaaaaggaatatataacccaaattgaaaatgatcacttgtagcaatcaagacaattaaaattgcaattataatctgtaatgctaatttttgccatgcacgcaagcctaaattacgtttgaagtaaagcttaataccatcatcaaggaaaccgataataccgtagcctaagagactgattaccaaaatccaaacaactttattcaagctgtgctgcatagcagctacccaaataacagaaataactgctgcaattacaaaaacggtcccacccattgtaggtgtgccagactttttttgatgccatttaggaccttcatcacgaatttcttgtccttcgtgatgtgaccgcataaatttaatcaacaatggaataaagatcactgtcaaaaccagtgaactaactagggcaatacaacttgccaacatcatattcattctgagttactcctttaacttaatgtttaattttcttccagcttttaattctgttcctttagccacgctttgactcgcaacagtgccggtaccttttatgcttaacttaatatctgtcaaactagcaaattggtgtaaatcactataagtccatcccgtcatatcaggacaaatgatttttcctgaagtattgacaaaaatcttagacccagactctaacttttcgccactcttaactccttgattgctaatccgatcaccgctaccaattttaaccaaattaagtcctaattgcttagtttgactttcagcttgtgcaacggttttagcttttaagtttggtacttttacagtagttgatacatcatcatttttagcaatcgaaatgattctctgcatcatcggtttgaaaattgaagccaaaatcttttcagctccgcctccaattaagtgtggttgcttaattgtcaaataaatacagtaacgtggtttacttgctggataaataccaacaacagagaaaatataattactatcaccctttagataacctccacctttagggttagcaatctgcgcagtccccgtcttaacagcaatatcggcgtttcccatcttataagcagaaccagttcctgattgcttattaagtacctttctcatgttagccacaattacttttctggttttagcactatatactggagtaccaacttttttaatctgatagccttgaattgtattgccatcagagtcagtaattttattaaccaactgtggctttaccatttgaccattattagccaaagaactataagcttgcatcatttgcattacattcacagtaacgccttgaccaaaagcagtaattgcttggtcaactggtgttttaaacgaaatcatccccggctgctcacctggaagactgactcccgtcttttcaccaattctgaacttcctcaagtacttcttccaagtcttagcacccatcttttgttctaacttaacaaaaccagtgttacttgaacgttcaaaagcttgagaaaatggaattgtgccccaacctgaagtcagccagtcatggatagtcgaaccagcaatattaacagaaccagaccggtaatactcattagggttgtaattgccactgttgactactgcagcgaatgacaaaatcttgaaaactgatcctggttcataagtatcttggaccaagatatcccgatacgacttagttaatcccttcatagtttgaggattaaaagtagggcgttgagaagttgccaaaattttcccagtcttcatgtcttcaactgtagcagtaattgatgttggtcggtaagttttctgtacttcacttaagcgagtctcaagcaaactctgcaactgagaatctagtgttaaatacaagttgtttccatttttagcaggcttataaacctgattactatttggaagctgatattcagatgcatctaccgaagaaatccggtaaccatctgtcccagtcaaagtcttattgaaataggcttcaattcccatagttccgactaagttttgtgcattagtctttttattccaaattggttgagccaatccaacagtatgtgatgcaaaaacaccattgggatacaatctagatggtgtttccaagaacttaattcctggtaatttcattgcttcaatctttttcttttgccgcaatgtcagtccactaccacctgtcccaaattgtacctgaaagaccttctttttgggggttaaatattggtaaattttttccgcagacaatggtaaaacctgtgccagcttttcagctgtcttggttttattcactacatactcaggtttattcttatagttgatcgaagtcttatctaaaatcgcataaaccgtatacaaatgcgaatcttccgcaattgttaatccatttcgatcatagatagtccctcgcgtggccttaattacctgattgcgcttataaagctgcttggtacgctgtgataaattttgaccattaactgtcttggatattccgatatataaaaatctagccgtaaatacaagaaaaaccaaagccacggccatttggagaaatctccccaccgtaaagcggtagccgtgggctttggatttttgtaattttaaattactgttttttttcattaacgaatcgtcctaatatttttgttaattagagttaatcctttttcacgtgcaattttatttaaacgtgaagtagaggtcaactccccaatctcttgacgtaaatcggtaatcttattctgttccttagcaactgtttgttgagttctagtcaattcatgttgagccgaagttgcagaaatactagaagaaactagaaagatcatcatgcccaacgtaatgacgcttccaataatcatcaaagctttttctatgccactataaggaactttacgcggatcaaggataattcgttgtcgtctttgcgaaccatttctactacttggttcatattcaatttttcttgctgagctatcagccataacattttcctctttataacttctctgcaacccgtagttttgcactgtgtgagcggttgttgttctctaactcagaagtagaggctacaattggtttgtgatttaccaaacgtagcgttggcttcataccgtccggtataaatggcattcctcttggcacctcaacttctgaatacttcttaaaaatccttttaacgatcttgtcttcatgagactgaaacgtaattacactgattcgaccacctggacgcaatatcttaattgcttcctctagcgaagcttgtaaaacatcaagttcgtgattaacagcgacccgcaaagcttgaaaactcttctttgccgggtgccctccagtccttcgtgcatacgcaggaatcgcatctttaatcacatcaactaattcaaaagttgttgcaattggcttttcccgtcgtctttctacgattctgtgagcaatttgacgagaaaacttttcatcgccatattgataccaaatatctgccagttctttttgacttaaagtattaactaactgataagcatctaagtcctgactttgatccatcctcatatctaatcgcgcatcataacgatatgaaaaaccgcgatctgcttgatcaaattgaggggaagatacacctaggtcatagtaaatgccatctattccatctgagtaacccagttttaccaggtccttttccagattactaaagttgtcatgtaccaattctaaccttggctcactatccagttgtaataaattcgcaaagttcaacttcgccgattttatcgcatattcatcttggtcaaaacctacaagcgtaccggtgtcaattttgctgagcaaatatttagcatgtccaccaccgccaaaagttgcatctacataaagaccaccgttttttggtttcaaattgtcgatagtttcgtgtaagagtacactggtgtgtttgaatttcatattttttatagttcaatgtcgtccaaattttcagcaatatcatcatagtcttcgttatcttcttcttcaaaactagtccaacgttcttttgaccaaatttcaattcgatcagagacaccaatgatgacacattctttaatgagtttggcatgcattttcaacgttgttgtcagattaacgcgaccttgcttatcaaactcacattccatcgcaccagagtagaataaacgcataaatttacgtgtattcctcttagtcaacggaagttttgctaatttagcttcaatcttcgaccactcctccatcgagtagccaaaaatgcagccttccattcctcgcgtgaatatcatcttgtcgccaatctgatcgcgaagtttcgctggtataatcaggcgacccttgctatcaagattgtggtgatattcacccatgaacatggtctagcccccttccactaaataatttaccacaattccccactctctaccacattcataagaaaaaaatacagatttttaaatttcttttttattgtgatttttcaaaataaaaaaaagtcacaaaatattgaaattttgcgacttaagcatatacaagtaattttattttataacactagcatcaataaaagtccgatataccagaaaacagtacaggcagtcaaataatcccataattttctaactgtttttcctaaagaaatatttttatttctaatcgcatcgttcagcgacacaacaatcactaatacaaaatagcataaaaaaccataaggtaaaaaagaaggtttattcatatgtaaagtaattaatccacaagctgaaagaaagaaaaatggcataacatcgtaccctctaaactgtgctttagggaaaattttattgataaaaaaagcaactactaagccaataattggaattaggaaaatataaagcataagtattcctccattctttttattctaaactataattgatttgaaaaaaaccgttaataagcataaaatattgttcaaataggagggctgtttatggcacgaaaaaagaaaaagaaatcaggttttcaaaaattaactattgcaatggcttggatcatggcaattattactttagcagctgttattgctcaagctgctatctcacttcaaagtttttaaggattaaaaagacgcgaaagaaaaaatcttccgcgtcttttttaaactcgataagcgtttaaatcaattaagaatggataatcctgagctaaattgccccaaatccaatacaagagaaaaaagaagacaactgcccaacctaaactgactaaaatgctcattaataatacgtgtgctgatgcagcactaatacccaccatattaaaaatgagccaactatacgcaacaaaaactgcagttcctaataaaacgacaattaatctagcccataacatttccggtaaaaaacgagctgttttttgacagatccagcaacttgcaggtaggaaaactgtataaacaccgataatgccataaaaatagatatcagcaacaattcctgcacctaatgctaaccaaatttcattatcattagtatcatcaaacagaccaatcaacattacactgattggcaaaatgacgcttgacgctgcaaagttgtcataagtcataaactgatgtaagtaaagtgcacatacaccgtctactaccaatgcaataaataagccaattgccaaaacccattttcgaaacgtagacattaattagccacctgtctttcaattacagttacaacagatggatcactaatatcacctgctggtttaattctaatctgatcagatagaccaaatgaatcacgagttgtcgtagtaactgtaccaattaacaagccttttggtgagttaccgcccataccactagtatatactctcgtgccggccttcagtttgcgaccatcaaccacctgtgtaaaggcaagataattattggaagtaactgtaataataccatgtactgtttttccattcgcagcatccgcttgaacagagaagcgattagccgactcatcagtagtagtaagtaattcaaccttggaagaagcagcatttgcttctacaattcgaccaataacaccgccatcgcacatgacagccatattctttttaattccagctgaacttcctttattaatcactaataaatctgaccatgtatcaggcgaccgagaaataacagaggcgttgaccatggtatagccacttaacgtatcttttaatttcaatgcagacttcaattgcctattttctttttcaagagctgaattgcgagccttcgtctggcctaaattagtaacttctcgctttagatgattgttttcttcttgcgtatttaaaatatcatgaacactatttaatccgcctgacacgagccctactggtacatcaacaattctagtacctaaagcaacgacatcgttacccaagctttgaatcagtaaaggtgtattgcgcctattgcgcaagctaacactcccacccaaaacggataaaataacaactactataataaatgctgataataactttttattttgcagaaattttttcattaagaattgatcctatagaaaaaccggcaacagccggcttttttattatttgcgacttctacgcattacttcaatattcttgagtgattcaccagtaccaattgctacacaatcaagtggatcttgagcaataaacacaggaaccttagttgcttcagaaataacttctggcaaattcttcaagagtgcaccaccaccggttaaaacaataccatgatcaataacatcggcagcaatttctggtgaagtttgttccaaagtctccttaatagctacgataatgtcttgaactacatcttgaatagccttggcaacatcaactgcttcaatatcaacagattttggtaaaccagttactaaatcacgaccacgaatattcattgattcaatttctttagccttttcaactgaagctgaaccaatttgaattttaatgtcttctgcagttctttcaccgattaataagttaaagtttgagtgaacatagttaacaatcgcattattaaacttatcaccggcttgacgaattgaagttgatgaaacgattccacctaatgaaattgtagcaacatcagtagtaccaccaccgatatcaacaaccattgaaccagtagggtccataactggaagaccagcaccgattgcagctgcaaatggttcttcaattacaaatgcttcacgagcacctgcaactctagctgcatcaattacggcacgcttttcaacttcagtaacacctgaaggaacacataccattactgaaggcttggaattaccaacagtcttttccataaaatatttaagcattgctgcagtagtatcgtaatcagcgattacaccgtccttcattggacgaatagctacaatgctgcctggtgttctaccaatcatttcttttgcttctgaaccaacggcgattacttcgcctgtttgtgtattctttgctactactgaaggttctctaagaacaatgcccttaccttccatataaacaagtgtattggctgtacctaaatcgataccaatattctttgtacctaatccaaacacaaaaatctctccttaactgttgcggtctctaaatcttgactaattatagcatactataactttaaaggcgcctttcacacaaattttaaagaactttaaaacaatttttctcacgcaaacttaaatattgaccttctcccacgataaaatggtctaagaaatcaattttcatcatttttgcagcttgacgtaaactttcagttaattccaagtcacttgcagatggcgttaatttaccactaggatgattatgagcaataaaaattccagagcagccataaataactgcccaccgaaaaatttcccgcggatgagcaattgatctattcaaagtcccttgaaatagtttcttctcagcaataatgtggttgctattgtcaatatacaatgcccacaattcttcctgcttgtgtcctatcagcttatcagctaaatacgtacctacttcaatgctagatgtcaaaattgtctttctcttaggtgaagcgcagcgcaaacgatctagtactgcctcagccgtaatagcaagttcatccgagcattctgaactggtaataaactttaatagatcattaaacgaatttaaccctgtgtttttcagaaaaacatttaagtcctgcaacgtatgaattcctttattttctagttgttcaaataattgtgtcaatagctctaaatctgttttgacaaagtaatgatttggttttctttttaacataaaatccccctcattacttattacgcaaaaaagagctaaatttttttcagaaattcaaaaaagttttgacaaatcatcgttgcattctgcttatctttaacagatggtgctttcaaatctggtaccatcacacattttaaccctgcattagcagctgcttgaacaccggttgatgaatcttcaaaaactaaaatattttctttaggtaaattcattttcttagctgcttctagataaatatctggtgccggcttagccttaatgtgacctctttgtacatcaagataactaagatgaaaatcaaaataatttctgattccagtcacccacatagcatgctgaactacattttcataattacttgaagcaatcgccatcttcaagccacgcttttcaaattcgtctaatgcttcttgaacaccaggttgcagctttaactttccctcatcagtccattgccacaccaagtcatcagttcgcttaataaaacgatcacggtctgcttcagttttaaaatatttatgataaaaatcctgcatctctttaactgtagcaccagttaacttgagataagcatcccgcggcgtgcccaaattctcttcttctgccgcctgaatattagcatcccaatacagcttctctgaattaactagcaaaccgtccatatcaaagataatgccttgaatatcatcatctagcccttgtacgcgcatcacgttttcctttccaatttaaaatagcactaaccaaataaaaggatccactaacaattaaaatatcattagctcccaagtgatctcgcagctgggtaaaagcagctcgataatctttttcataattatatcttttttgtacatcaattggaaaatcatcttttttagctactcgcggataagataaagttgtcagtaaaacttcatctttatcatcaaacaagctaaacacctgctcaagatccttatctttcatcatagtcactaaagcataaagcttgccatgcttttgctgggtcatacgatgaacgactgccagcaaattactcattgcctgaatattatgtgctccatctaaaatgattagcggattttctcgtaaaatttgatagcgccctggaataatcgtttgattaatcgctgtttcaacttcttcatttgataaaggcagtttcaacaaaaagaacgcctggcaggcaacggcaatatcataggcttcaacttgtggtcgtaaagcaaaaactagctttcttttgtgatcttgataaacaatttgattatcaagcaaaacactaaagtctcgtcctaattgataaactatcgcatgttcttcttcggctttacttttcaaaattggccaaacaacttctggcacgttacctaaaactactggtctttttgccttaataatgccgcttttctcacgtgcaatatcctgaattgtaggtccaataattttttcatgatcgagaccaattgtagtaataacacttacttctggcataattacattagtcttgtcatgttctccaccaattcctacctcgataacagcataatcacactttttttgagcaaaatagacgaaagccagtgcgacttcatattcaaaggttactaacgaaaaagttgagtcctgctgctgcaatttctcataagtaccctgcacaatattagctgttttaactaaatcctgatcactaatattttgattatttaactgtattctctcattaaattcatagacatacggtgagacaaaaaggccagtcttttgaccagccttttttagtaggtttgataaatagtatgaagttgaacctttaccattagtgcccgtaatgtgaatcgttttaactagatcttgaggattgcctaattccaacaataaccgcttaataaaagacaaattatttttaggatgtaaatgaggcaaagcatataagtaatcgattacttcttgagctttagtaaatttcaattatttactctctttcaaatcttgaattctttcacgaacaccggctaattgactttcgtagtcagccttcttttccttttccttgttgacaacagcttctggagcgtgaccaacaaagcctttgttagccagcttcttttcacaacgagcaacttcgtcttcaagacgcttttcttctttttccatcttttctagctcatcgtcaacattaacaagttcagttaatggaacaaaaatttgtgcgcctggaattacagcagtcttagctaattttggtgcttcaacttcactagctacagtcaattcctttggatgtaagaagttttcaacgtaatcagcattttcgtccaaaacgcgcttgttagcttcatcgtctaattgaatcatgatgtcgatttgacttgacattggtgcattaacttccatgcggatgttacgtactactttaatagtttcaattaagaaggccatgtcttgatctgcttgcttgttttcaaattccttgtgagtagttggatattcagcaaccataactgacttaccttcatgtggcattgaaagccataatttttcagttacaaatggcataattgggtgaagcaaacgcaagatttggtcaagaatccaaattaagttttcttgctttcttgcctttaattcttcatcgtcaccattcaaagcaaccttagaaatttcaatataccagtcacagaagtcattccaaataaagttgtaagcttcacgaccagcttcaccgaattgatattcatcaaacaagcgagttacttcactaacagtatgattcaagcgatcgaaaatccaacgatctgataaatcaaatttagaagcatctggcatatgagctggtttagcatctgctggcaagttcatgattacaaaacgacttgcattccaaatcttgttaatgaagttccaagcagcagataatttcttaggatcataacgagtatcttgaccaggagcagtaccattaagcaagaaccaacgaagggcgtcggcaccgtatttatcaactacatccattgggtcaacaccgttaccaagtgatttactcatcttgcgaccttgttcatcacgcattaaaccgtgtaaaacaacatcattaaatggacgcttgccagtaaagtgcaaactttggaacatcattcttgatacccagaagaagataatatcgtaaccagttaccaaggcattagttgggaagtagcgcttaaagtcttccgcattagtatcaggccaacctaaagttgaaaatggccataatgcacttgagaaccaagtgtcaagtacgtctggatcttgttcccagttttcaatgtccttaggtgtttcttcacctacataagtttcaccagttttcttattgtaccaagctggaattcggtgcccccaccacaattgacgtgaaatacaccagtcgtgaacatcttccatccagtgatcaagagtttgttcaaatcgttctggaacaaagtttactttgccatcagtcttttgattttccaaaactttgtcagcaagtggcttcatcttaacaaaccattgcttagaaagacgtggttcaacttgaacgccagaacgttctgagtgacctactgagtgaacaattggttctatcttaatcaagtaaccttcttctttaagatccttaactaaggcttcacggcattcaaaacgatccataccagcatacttgccagcttcttcgttcatcgtaccatcatcgttcataacattgattctttcaagattatgacggttaccgacttggaagtcgttagggtcgtgagctggagtaatcttaactaaaccagttccgaattctggatcaacgtgttggtcttcgataattggaatgtgacgaccaacaagtggcaagatcaattctttgccaacaatatccttgtagcgcttatcaccaggtgctaccgcaacggcagtatcaccaaacatcgtttcaggacgagtagtagcaatttctacataacctgaaccatctgcaaatggatacttaatatggtaaaaggcacccttatcatctttgtgaataacttcgatatcacttaaagcggtttgaagtgctggatcccagttgatgatgtattcaccacgataaattaagccttcattgtaaagctgaacaaaaacctttttaacagctttagaaagacccttgtctaaagtaaatctctctcttgaataatcaagtgaaagacccatcttagcccattgacctttgatgattgatgcgtattcatctttccaatcccaaacctgtttaacaaaagcttcacgtcccatttggtgacggtctttgccttgtttacgcaattttgcttcgaccttagcttgggtagcaataccagcatggtccataccaggaaggtaaagagtatcatagccttgcatccgcttaaaacgaattaaagtatcttgaattgcagtatcccaagcgtgacccaagtgcaacttaccagttacatttggtggtggaataacaattgaatatgggtgagcttttttgttacctgatggcttaaataaatcttcatcaagccaggtttgatatctacctttttcaacctcgtttgggttgtatttaggtgctaaatctgtcataaaattcctccaataaaaaagtcctagacatattgtctaggacgatcagttaaaccgcggtaccacctacgttaagcatgtatcaaacatgcttctcttgaagacgataacggcgtataccggattaacctactttttattttcaattaatcagctaatcaagctactagtcaaccttcggcctctcagctgtctggcttttctctgttaataaagtcgacccctcttgattcttgctttggttatgattatagcatgaacttcactcagaaaaaagggttaggaattagtcgtaattaagttagccatatgtctttattcttttaataaatcagcaatacatttttccgatgaatgatattgcttatattgttttaacacgttgattaaatcatcatagtgactattccaaaaataataattttcatcataagatttcacactcttaagatcgttataatactgcttaacaaaatcactaggcttcactttacttttatagttatttgtatatcgctgatagtcttgatgataaagaatgtctagaatttcaatctcaggtctagtacgaagttctactacttcggatactttctttttatacacttctggaagattaaacttttcggttttggaatcaagtatcctataaattttaacctttctacttctaaaccctttattcaaaaattctttagcaaactttttagcatttcgtgctctaattacttcaccttcaagaagatcatcctcgttgaattttagtgcatcgtgttccaatagaacttccataattgctcgttcagtatgaccttctacaataatagcgattagatctgtagagttactcatccattttaaccgccttttctgtagccttctttaaagccatgtaggcatcataatctggagctgtcccacctaaataatctgattcaaaaacatcggctttatttagatcgcttcttacatcagcagttgaatatctttgaagctgaatcttgccttctctcttagtaatatattcttcatcagttctttcaattttatccaaaatttcagtatagtgcgtactaaataccaaagtagctctatttatgttgattttaggattagtaaaatactcaataaaagaatctacaatagcgtgattaaagtgattctcaaactcatcaataaagatgatgccaccaacggaaagtgcattaattacctcgccataaagagttatccctttagctgtaccagaagacaagtattttgcaatcgttgtaaaatcattttctgcaatctctgtatctttccctttaaacttcagcttaaacaattgtttagtagcaccagagccctcaggcttgttttcaattttaagatattcaattgttggatctaaaaagtttaaaatttctccaggcacattgccagaaccatacatcaatgcattaaagtcagtaaagaacaaagtatcaaatggtatttgaggataatacttatttttcgaaataatcgctctaaaaatcgaatcatcagacgacaaaattgaagaagctaggtcgcctaattcttttctgtctaattctggttttatatttttgaaatcaaataattttttctttgaaagattaacagttaccttttttcgatataccgtttcagactcaatatgccagcttttacttaaagttttctttaacttgaaaactaaactatccttataaactacatgatcagttccataaaaataagttgtaacactaataggctcatttcctattagcacatccgttagcttagtttgatcaattgacttttccatcacaactgtttgaagaattcctatcaagagtttcatgatcgtagtctttccagtagcattagtccctactagagtgattaaattattcacccataaactgccgagcaaatgagttaatcgatcagaggtattagaagtaacccttgcatcactgaccagtgaaaattcaagatcatcctcaaatagcggatgatcttgaatttctaattttaaaaagtataatttatttttattcataattattcacctaaaattgttttattcaggctaaattttatcatatttttgcattttatacataaaatctgtttaaaatataaataatcctcatcaagtagttactacttcatgaggattatctaaaatattctactttctaatcatcttaactgcttgaatcaaaatcgttggaatcagagccaagccagcaagccacattacttcttgcccagttaacggagtaactgcaaacaagctatgtaacgccggtacaaacaaaatcaaggctaacaaaattgttccgacagcaaatgctgctaaactgtaccagttatttttgaaaccgatcttgaagatactgtgttgtgaacgacaattgaagccatgtaaaagccgagcaaatgtcaatgttgagaacgccatcgtcgttgcaactgcaggactatcttttagtccgatcaaaaaggcagcaattacactaatcgaaatcaacaaaccttgaatagtaatttgactcacaaaggctttgtccaaaataccagccttaggatcacgtggcttacgtttcaaaatatctggatcacctggctccattccaattgctaaagctggaagcgaatcagttaccaagttaataaagagcaattgaaccgctacaaatggtactggtaagccagcgagtgaagcaaataaaacagtgataattgctgaaaggttacctgataacaagtagccaatagcgtttttaatattttcataaactgttctaccgttagcaacagctttgataattgtggcaaaattatcatcggccaaaatcatgctggcagcatctttagatacttcagtaccagtaatccccatcgcgacaccaacatcggccttcttcaaggctggtgcatcgttaacaccgtcaccggtcattgatacgatacgatcttttctctgccatgcattaacaattctgatcttgttttcaggcgatacacgagcataaaccgaaatcttctcaatgttttgatcaagttcttcatcgctcaaagcatctaattcaaggccagttaaagccatgtcaccttcattgaaaataccaattttcttagcaattgcaacggcagtcaccttatggtcaccagtaatcatcacagtcctaatcccggcttccttagcacgagcaactgcagctacactttcttcacgtggtggatccatttctgaaacaaggccaataaaagttaagccatcttctgcttcagtagaaagctcttcatcactttctttataagcaaaagccaaaacacgcaaaccattttctgaaaagtaattgttttgtgccaaaatttctttacgatcttcttcagtcattggacgaatttcatcgccgaaacgaatattgacacagcgtttcaagagcacatcaattgcacctttaacaaaaatagttggtacagtatgaatcaaatgcttagtactcatcagcttacgatctgagtcaaatggtacttcttccagacgcttagaatgttcgcgtaattcttgttctgataagcctaaaacaccattacctaagtcaattccgggcacttgacgatacatttccagcaaggctgactcagtcggatcaccaattgccttatcttcggccaaacttgcatcgttgttaagcactacatcataaagcaagtagcggtgaagttgattactcaaatccagctcatttggctttaaaactttaccaccaatatagatgtcctcaacagtcatcttattttgagttaacgtaccagtcttatctgaacaaattactgatacagaccctaaagattctacggctgccaagtttttaataatagcattttctttagccattttttgcgtacccattgcttgcacaatagttacgatagaactcaaagcttcaggaattgcagcaacagctaaagctactgcaaatagcagtgaatcaagcagcggttgaccacgccacatttgaataccaaagatcacagcacacaagattaaaatagcagtagccaatcgtgatgaaaactggtcaagtgatacttgcagcggagtgcgacgttccttagtttcattcatcaaggaagcaatcttaccaatttcagtctgcatccccgttgccgttaccacaaccgtagcacgcccataagttactaaggaactggagtaaaccatgttaacccgatcagctagcggcacttctttttcaaaatcagtgtccaacttgtcaacattagtcgattcaccagttaatgaactttcgttgacttgcagagaataattttctaaaattcgaccatctgcagtaactaagtcacctgcttctaacaaaagaatgtcgccaggtaccaagtccttggcctcaatctccattttttggccattacgcaaaactttagccgttggcgcagataatgactttagcgattctagcgacttttccgccttaacatgttgtaccgtacccaaaatcgcattcagaatcaatacaacaataattaccaacgtactttccagactgcccgtaaaagcagaaattattgccgcgataattaggatgatcaccattaagtctttaaattgttctaaaaagacctgaaaagtaattttcttctttccttcaactaaagcatttggaccaacttgagctaatttctcttgagcctctttagcgctcagcccctgctttaaatcggtatttaactctttagctatctcgtcttttttctgacgatagtattccatgtaaagccctccctaaacataagagtaatttaagcaaaaaaatagagactactggctaaaacactgtttagtcaatagtctcatcatttaaacttacagcggaaaataaatttcgttctgacgccgtaaatacaatttatgccgattactccctatttacttgtacataattaaaccatatcaagtaggtagttggcaagctattttaactttcttttaggaagttttctaattgttcatcggtaaaatcagaaccgtaattttgttcaaggagatgcatgatctcttgcttggtattaccagttcttttaagtgaagaaactaaaattttgacgcctcgtttaagtccctcttctttaccttcctcacgtgcgtcttgttctcgctccagtattttctcttcgtagtccatgatataatcactccattccgagcaataagataatcatttgtacttcttatctttcaataatccgttagcaatatcagccgaactaactggtacaccgactaaacgctcattttgccacaaatcaaaaaaatcagctggcatcatttgatcaaattcatcatctgaattcattaaatccttataaacacgtgacttctcaaataaatttagagcctgcttaggataaatgtttaatctcttagcaattaagtcgctaattgcttcagctagttgctgatgaaattgcttttcactaatttcgggaatcatctaaccaactccttatctatgaacgttaaagctttgagagctctttctgtcttgaaacaatactgctccgaataaacactcggttttaattttagcagagcctcatctaaatctagattaccatgtttccagcaattaacaacagaaaaaagtttaccatctgctgttgggccaatgacgatatcagaattatcttttatattattcattctattttgaatgacaaacttaatccaatcaatatctgcttggtaaactaatattttcaagtcgggttgatcagcatcgaatacatatctatttaatgtcggttgacctgaatatctagccttacgctttgcccatttttctgcttgtctacgattagcagtcacataaaagccattaccaaaatcagttgtaaaaacatttttatttatacgaggctgataaacagcctgattgcttccatgatacaaaatgactttggtattgcttttcatgaatcgtgatgtatgcgtatttttcatcgcgcacctctttcataaatagtaggacaaaattatcctccactatttattacgcaaaaaagcacgatttttttgtgagaaattaaaataaaaaaagaaaatgcctgagaattatatcccagacattcaccaatttacggctctttctcatttctcttccttcacaatataaattggtcgttctttaacttgtaaatagattttaccaatataacggccaataattccgatacacaaaagctgcaaaccgccaatcaataaaataattgaaattgtgctggcccagcccaaaatacttgaaccaggaactattagtttacgaacaattacaaaaataagaccaataattgacaaaatgaatgaagttgtcccaatccaaacagctaagttaagcggtgctggagaaaaatcagcaatcccgcccaacgcatatttgaataatttgtgagtcgtccaatcagtttcaccagctacgcgctcgacattgtggtactcaagatacttagtcttaaaaccaacccaagcaaaaatacctttagaaaagcggctgtattctttcattgataaaactgcgttaaccatctgcctggtcatcatgcgatagtcgcgtacgcctgaaacaatttccactttagaaatgcgattaatcaccttataaaattgattgctcaagaaagacttaaacttaccttcccctttacgatctactcgtctgcagccaactgcatcatagtcaccagtctgcaaaattttatacatttttggtaaaagtgaaggcggatcttgcaaatctacatccattaagacaatataatctcccgttgcagctgataggcccgcatagatagcggattccttaccaaagttacgagaaaaagaaatatagtgaacatgtttgtcctgctcatgcaattttttcaattcggtcagtgtgttatcattggagccatcatctacaaaccaatattcgggcgtcactttgggcattttagctaatactttttgcactgctggataaaaaagtggaattgtttcttgttcattaaaacaaggaaccacaattgataatttttccattagatttcttctttcttagcttttctaaaagtaactactttattaattacaaattgaattaaagttgctacaaaagttgctactattttaacgattaagtgcggataacccaatttagtaacgaaaataaatagggaaaccgtagtaaataccgtggtaatctgaccaacgataaaataagaaataaatcttaatatcatgcgatcatgaactttaaagttagtataagaattccataaaaagttattgatgatcccgcaggtagacgaaataatgttagctatttcaacattcatcttgaaatgcgtcaaaattgtataaattccaaaatcaacgactagccctaatacgccaattagaacatactttactaattgaacaaaatcttctgaatagattgctgttttgattttttccataattattcctaataaaaaatccagacaagaggtcctggatttcaacatatttaactaatatggtcttaattatatcattgtttttaagctctacgttttcattattaaagttaaaactttaataggaacaccttttgcattaattataatttttgtcattcaatctatctgtcttgttagtatcctcatacaaatgataggaactcttaatcttatgcctgccttgtggatcaaacatgcagagaaagataacatagcaacactttaaatttcgatatgtgctgcatttcaaaatcatacagatttccatcaacatcctcaaccaaaatatcgagaataacagctttttgcttagggtgtttgggatcagcgacctttctctgcttctgcagataatgaatatctctaatctcaatctccggcaccagtccctgtaggacatgcttgcaaaaattcttgttagacataatctcaccaaagattacatcctctgtgaagccaaaccagggcttctttttcttgtgcgtattttccattgcgcacctctttcataaatagtaggacagaattatcttccactatttattacgcaaaaaagtgcaatttttttgtgagaaattgaagttttttaaagttttacccaactatatcttccaacttcaattccagatattctccccgctttaagttagcaggcaagcttaactttcccatcgaaattcgctctagctcaacgactttcatccctaccgcaccaaacatacgcttgatctggtgatatttaccttcacaaattttaatttcagttgtagacctatcgtgctcttcatcctgggataatatcttcaattctgctggctgcagtttggtcccatcgcctagtgtcattcctgaagcaaaagttttaacagttgcatcattagctacaccagcaatttcagcacgataaactttatcaacatgcttaccaggtgcaagcaattcatgattcaactgaccatcattcgtcaaaaggagcaagccagtagtatccttgtccaaacggccaactggcacgattccttgataacggtcctgcggtgcaagcaaggaaatcaccgttggctgattgcgatcttccgtcgctgacaaaacacctttaggtttattcaataagaaataatgatatttttgataagcaacagcatctccgttaacggtaacctgatcgctttctttaacttgctgctttggcgttttaacaatcacatcattaaccgcaacaattccttttttaattaattggtgtacttcttttcgtgagccaacattcatattggccaaatatttatctatgcgcattatgtctttctttcgttcttatgtgttgattaatattaattatataagaaagttaacccaatttcgaattgcgacactaatcaaaaacggtcgattttgttttcgaccgtttttacgcgcgttttgcgcgcgattatttgcttaaaatatattttgtagctctgccttcacccattcttctaatataaccttgtttttctagttgccgcaaaatcttcaaaactttcgtcctaccaaacttactcatttggctaatttgcttcgtagtatccgcaccttcatgaattatttgatatactttcttttcatcattagacagatcgtccgtaataaattttaaaactggcaatattatctttatcgaattatcaaaaatttcaaactgcggttgaaccaaactacttctataagaatcatttattcttcttacacctgtaccaaattgctcaattaatcctaacctaaagaaaacattagcaataattggattacgcaaaatggaaatctgacctgaaagatattcttctttgctaagtccttgtggcaatccacctggagatactacttcaattctgtcatcatacatagaaattttaatttgcgaattaatgttccaaactcgatgaactaaggcattggctattgcctcacgaaaagcttcttctggaatctgacttacaatatttcgcgttgctccctgtatttcttcatgttgataatattgacgatatttttgaattgcttgcttatactctttaagaatagattcatgctcataacttgctcgatcaagcataatattaatgctttcaccaaaccgaacaatatcaattccacgataattatttttgtctgccaaaagctcaccggcattagtgtaactagtatccttacgctctaaattaagcgtaatcaatatatcagatgttaaacttttaattcctatcttttcttttaatgcttcttctaaaatgttaaatgacaaattttggttcatcgcggttaaactatcataggttctattttcaccaattaagattaactgtgataattcagatcggtccacttcgatcgaagcactgtcattactcttataggcctttgatttgtataaatatggaggattaactccttgctttactgttaaagtaaccacattagttttaggatcaatttctaaattataatctggatttggtttgatcgaatcgttgattttattttcaacatttaaacaaaattcaactggatttttcacaccaacgattgatccatcatcctttattccaaatttaattttgccactgccataatttgcaaatgcactaaccgtttttagaaaagtattcgtcaatttctctttaaattctaaatttttggtttctctcatttaggtcaccgtttctaaactatttagttataattatactctttcacgcgcaaaaaaacggtcgaaaacgaaatcgaccgtttttacgtgcgttttgcgcgtgcctattatattaactttaaatcaatacataatactactagaagtttccatattaacaccatatctttctaaataattaaactgtatcatattaaatttcaaaaacaccagtgaaattaatcctctataacaagtcagcgtcttcttgagctttatcatccaagaatttttcatttggataaattggcgtaatctcaataccagccattgccctttcaatcaggccttcaacgtcaagacgagcttcatattcacgcgctttttccaactttggcttagtcttaggacgcggtggagcaaaaattgtacaacaatcttcaaaaggttgaattgataaatcaaaggtaccaatctcttcagctttggcaataatctccgttttatccattgttgcaactgggcgaataaccggagtagtagttacatcattgatagccaccattgattgcaaagtttgagaagcaacttgaccaactgactcaccattaaagatagcccagccgctacgttgtgcacgaatgcggtcagcaagctgcaacataaaacgacgttgcacagtcatcaaatagccttctggcagtttttccttgatcgtttcttgaatttcagcaaacggtacggcaataaaattaatcttaccagcgtagtttgccaaaataccagtcaattccttagccttagccaatgccttttcagtagtgtaaggtggactaaagaagtgaaccatttcaatatctactccgcgcttcaatgccagccatgaagcaactggggaatcaatcccaccactaagcatcatcacagccttaccagcagtaccaacgggcatcccgccaacaccatggagcaactgattagaaatataaacggcatcttgacgaacttcgattctcaagaccaaatcaggatgcttcatttcagccttcaagccatccatatgatcaaacaagtagtcaccaactagattattcaattgattagtgtcgtattcaaacttgtggtcactacgcttggtattaaccttaaaagtcattcctggcttaaaagtctcttgcatcaattccaaagaagtcttttcaatatcttcaagagtcttaggaatcttaattgctggtgagtaagtttgaattccaaataccttcttcagacgttggtcaacatccttgaatgatgcgccattcaggacaatgtgcatccgatcatgacgaggatgaaattcaatttgtgggaaatccttaagaactttttcaacgttacttgctaagcgattgatgaagtcctttctgttcttccccttagttgaaagctcgccatagcgaaccataacttctgtgtattccattaattttctcccaaatgattaattttagcaaaatgattatagatcttgtcaaagaccttaataaattcatccgcttcttgaagcgtattcgtctcatcaaaacttaaacgaattgcactagtagcaatcttatcatcaattcgcatagaaaccaaggtgctagcctcatctgccgtctttgatgcacaagcagaagtagttgaagtataaatatcttgatcttctagcgtatgaaccaaagtttcgccccgaattccctctaaagcaaagcaaagaatatgtggtgcaaagccatcgcttactggtgaaaaaatattaatccctggtttatcttttagataatcaacaattttagccttaatttctgcttcacgcttggccttttctggttcatcttctaaaagcaaacgaattgccatagccattcccgcaattgcaggcaagttctcagtacctgaacgcaagcccttttcttgaccaccaccatcgtgtaatggggtcagcatcttgccttcttttttatataaaatacctataccacgtggtgcatggaacttatgcgcagataagctcgagaggtctactcttggtgtaaaaaccttatcccaaatatttttgccaagtgcctgaacgttatcaacatggaactgaatcgttggataattttcaagcaaatcgctaatctcatcaattggttgaatggtgccaatttcgttattaacgcccatgattgaaaccaaagttgtatcagaatcaatcgcgtttcttaagtcattaacgttaactcggccttccttatcaactggcaatctggtaacgcgccaacccaaattctctaacgcgttaaaactattggctacagatgcatgttccacgctagaagtgataatatgcttaccaaattcacgcttttgaattgcagtccccttaattgcggcattatttgattctgttccaccagaagtgaagaaaatttcatgctgcttagtccccagcaaatcagcaatttgtttacgtgacgcctcaagcaattggtgtgcacgatcacccatcttatgcaaactcgaaggattgccccaaatattagtcgctactttattgtaagtatccaatacttgtggatctatcttcgttgttgcactattatcaaaataaatcactatcattaccccttcatttaaaaaacggtcaatcgcttgaccgtttcaagacttttcaattttagcttaaataatgaatcgcttcaattaattactcttctcttctgaataatatgcattttcaagtcgttgataactacctggctctaccttttcaattgctgtagcaattgtatcaagggcttccttatagttatattcattatatagctgcattgctgtcttttgtgcttgcgcaattgaatccttatctgcatatttatttgaatactgcatcgtcaattcaactaggttagcggaattaatgatgtcatctgcttcacgtttaagccgctccacatcatcagaaatttgaattaattcagctgagatcttttccatattaatccggacctgacttaattcgttgctgacatgaccaatctcgttgactaccaaagtgtacatttggacaaagctatcaggattgccaggcaaatttcgtctttcaagtcgacgataaactaatgaaacttcttgcttaaagcgcttgattgaatcattagctacattttcagaatcataaagtccatcaacgtcagttgacatcttagcctgctctgcatcaatttcacgcaggcgatctagcatctggagccatgaatcttgaatagcagagtaaacacccttaccatctgcgatattctgtgtatcaatagtgtactgatggtacatttcattgacttctttttctaagtctttactcttttccaattcgccatgagtcaattcatagctctcatcaatatgccgcaacttttctaccagtttctttgacgcggtttgctgatgtgagatcaaagtcagcattttactttgatttttttcaacaaatggtcttgccttgtattccttagctaaaacatcatacaggtcgtcaatttcgccagagatctttttattttccttggctaattcatccaccttagtctcagctagcaatttgcgcgcaccatcaatttcatcatgaatttccttgattctgcccaaaacatctacgctagtaaggtaatatttttctgaaatcatttttttataagcatcagacaattccttaagctgatcttggaacactacttcaagctgatgataaccctcttttagcggttttaagcgtttttgtaagttacccaaagacatccgaatcttggacaaaactcgcttagcttcaacatgatcaccttgtgaagaaagattttttgcttcttcaaagtcactctccattgatgctagttgatcttcaacctgatcaatcgcagcaccatattcaaaggaattggctaagatatcttttcttaattcacgataaactttaatcaaagcatcatattgaatttgattttccttatttgattcaagtagttccgtgaaaactgccttggtgttacgagcatcttcgagcgttggcttgataatctcctgtgcttgtttaatattctttcttgctttaaacaagcgataagttgcattttcattagcagcttcttcaactagcttatgcactcgcggtaattttttcttagctgcttcagtgtagctcttgcgccaagtatttaatgtagttaaactttcgccggccaaatccattttatccagtcgcgtaatatcatcttctagatgcatcttctcaatttcagtcactgctgcatcaatcgcttcaatttcttttagttgtttacgattgatcattagcattgctgcaactacgacaatgattaggatcaccacggcaataattataatagcttgaattgatgacatagtttatcctccaaaactatcataattataacaaaacctgaccctaataggtgcaaaaagctgttctattttcttgatttattattctgaactctatataatactattcgtgtaaaatatttgcagcaataagtgacaagaacgtcaacatcttgaaacgctttagtgaacgagtaacccgcgctgcattgggcgaaaatgtaaatccaagatgcacgaatgttgaacttatgcttaatattttactccaaaaattattgtttaaattttatggaggattttttatgtcaagatatacaggtccaagttggaaacgttcaagaagattgggtatttccctttcaggtactggtaaggaaatttctcgtcgtaactacgctccaggtcaacacggtcctaacaaccgcggtcgtttgtcagaatacggtcaacaattgcacgaaaagcaaaagttacgttggatgtacggcttaaacgaacgtcaatttagaactttgttcacccgcgctggtaagattcgtgaaggtcaacacggcgttaacttcatgattttacttgaacgtcgtttggacagtcttgtttaccgtcttggtttagctactactagagaacaagctagacaattggtaaaccacggtcacattactgttgatggcaagcgtgttgacattccttcatacgaagtcaaggttggtcaaactattggcttgaaggaaaagtcaaagaacttacaacaagttaaggatgccttagaagcagttactgctcgtccatcatttgtttcatttgatgaaaacaaaatggaaggtactcttgtacgtttaccagaacgtgacgaaatggaaccagaaattgatgaagccttagttgttgaatggtacaacaagttactttaatttttacattttattttgtcgaaagtctttctcaatcgagaaaggcttttttctttgctacaataagtacataaaaagaaaggatgattagatgactgaagatttaaataaacgtgttgaacaagcagctcaaggtattactccacaaactaagcctgatgaacgccgcagatttttaggttcattacgtgagcgctgcttaatccgtatggacaatactgaagttaaaaatcctgaattaactgccctatttcttaaacatatcactgactttaagggctatactattttgatcaatggcaatatcactgatgatggcttcttgggagacattgaagccagttgcagcaaatatgatattcccttcactttagttaacaatgaaaccgcaaaaacaggaccacatgatacggcagtactagttgtagcgaaaaacgctatcaatcgaccacgaattgagctaaagcaagtttatccacctgagtttcctaaagaagaattagccgcacctaaaacaaaagaaagtttttggcataaactttttcacggagataagtaaatgaaaccattagcatatcgtatgcgaccaactaatttagacgaagttgttggtcaaaggcatctgattggtccaggcaaaattattcgccgaatggtggaagctagacttctgtcttcaatgatcctttacggccctcctggcatcggtaagacaagtattgctagtgctattgcaggctcaactaaatatgcctttagaaagctcaatgcagctactgacggcaaaaagcaattgcaacaagtagccgaagaaggcaaaatgagtgggacagttgtcttattgctggacgaaattcatcgtttggacaaaactaagcaggacttcttactgcctttgctagaatcgggacaaatcattttaattggggcaactactgagaacccttatatttcgatctcccctgctattcgttcacgttgccaaatttttgaattaaagcctctttctacagatgatgcttctcatgcaatcgatcgcgcattgaacgataaagaaaaaggtctaggcaaatataatgttgaattaacagatgatgcgcgtgctcttttgattgaaaaaggcaacggtgatttgcggtctactttgaatagtttagaattagctgttctttcaactaagcaagaattgcaagataaacaccaagatgatcaaaaaattatcatcactcaaaaagaaatggctgattcaattcaaatgaaggtgcaaaactttgatgcttctggtgatggacattacgatctagtctcagcatttcaaaaatcaattcgtggctctgatacagatgcagcgctgcactatcttgcccgattaattgaatctggtgacttagtctctatctgtcgaagactagcagtaattgcctacgaagatattggactagccgatccagacgcagctgaacacgctatagtagccatccaagctgcacaaatggttggcttgcctgaagcacgaattccactggctaatgcggttattgagttagctctttctgccaaaagcaatagtgccatttcagcaattgatgctgcactagctgatattcgaaccaaaaaagttgactcaattcccgccaacctaaaagatgctcattactctggtgccaaaaagcttggacatggcgtgaactacctttatcctcatgattatcaaaatgattgggtagcacaacaatacttgcctaataacctgcttcatgccagctactttgcacctaaaggcaattctaaaatcgaagctagatataaggcaacctatcaaaaattaaaacaaatgcagtctgataacttgcgcaataatcactaatctcgcgcattcaatatggttgacaagcacctgtaatatgcgtattataataagtgatctgagttgatcgacaagcttaaatgtataaagttgaccgatcaaactataagacgtgggagttggcaaataactaccgaatcggaatactgccttgttgcaggatccatattcgctgcgatgccagctaaaattttgaacattgcgggttcaacaagcgtcattatgctatgtttagtcaactcggatttctttagaatattaaaaaaggcggtctcaattgaccgtctttttctatagtggagactgttaaatggcaataaagattgtaatgattatttttatccttctcctactgttaacctcgtggtacatgtggcacagaaggaacggacattttttaatttatgacattggtggcgatccacgcttgagcaatattcttaagtggacttcagtcgcccttttagctgaaagtattttagggattattttgctattcatgggtaataaatatttaaatctaatcaccttattcttagcttcattaactattttggcttttggtttatcaattactcaaaataaagaataataattcactaatgacaagcaaaattttggtaaaatagaatatagaaagaggtgcttatatatgctttcacaatacaagaatattcaagttgcagttgatggttcaaaagaagctgacttggccttcagcaaggctgtagccatcgccaagcgtaaccatgcaacactagaaatcttacacgtaattgatactcgttctttccaaaatgtttcaagttttgattcagcaatggtagaacaagtttctaaagatgctgaaaagagaatgaaggattaccaagctcgtgccactaaggctggcgctgaagatgttcactactctattgaatttggttcacctaagacaatcattggacatgacttccctaagaagcacaatattgatttaatcgttgtgggtgctactggtttgaacgctgttgaacgtctgctcatcggtagtgttaccgaatacgtaaccagaacttctaaatgtgacgtcttggtatgtcgtactgaagaagttaaggatgctttgcaaggctaattatttagctttaataaccgataaaaaaatacctccaaaattcagatttgaatttttggaggatttttttaatgttatttctaaaaatcgccagccgtactgaacatgtaatcacgattatggaacttcatcgacaagattaatccaatcccaatcatgtttcccatcagagctgaaccaccctgagaaacaaatggcaatggaatacctgtcaatggcaataaatcaatattcatcccaatattttcaaatacgtggaacaagatcatcatgataacaccagttgcaatgtatgaataaaagacatttctggtatcgaacgagatttttaccatttgaataatcaggtataaataaatcaaaatcaatgctacacagccgacaaaaccaaagttttcaccaattaccgagaaaaccatgtctgatccacgaactggaacataaacgctagctttgccaaaaccattaccaaatagttgaccagaaccaatggctttcatactttgccataactgataagctcctgatgaagtatcaccagatggatcgagccaagacttaattcgttcaaattgatatgcttgaaagaaatgactcaacaatgattgcccagccgacgtagttactaatacaataaccccaatagctgctaaaatcaaaataccatataacggtacaataattttccaagaaatccctgatactaaaaccacgccaccaacgatggcaataaatactaacatagtaccaaagtcattctgtaactttagtaaaattgctaccggtgccagccaagcaataattttgcctaataacaaccaatcggtcttaatcgtgtgaccatatttatcattatgctctttgaccactcgagccaacatcaagataaaagctggcttcataatttctgaaggctgaaaagtaatcggccctagtttgaaccaacttttcgcacctgtatctgcagctacgcttctgttatataagaatagcaccgcaatcagcaaaaatattccgattccaaagaaaattggcgcaatcttaaacaactgttctgcatcaaactgcatcacaaccataataattgcaattgaaatcaagtaccataatgcctgcataactactgccctaacaggtgaaccaatatgactaggatcacctaatgcagcaacatagatacaatacaagctaattaaagccaagagtagcactggtataataatattccaggctaatcgatcgaatagacttgtttcattttcaacttttgccattaaataatcactacttatattttatttttcatgtaaggtaaagtatgaaagtaagtcattaatgctgctttcaagactgttagcaaacaaaatattgcttgtcttagaagtagtagcacgataacgcccctctaccttttcaattaaaccaatggactttctattaggaataacaacttcccacgttggcaaattctttcccttaagttcattaacttcaatatcaatattctctaattttttagacataaatcctcctacttgctatccggatgaaattttgaagcaataattggatcttcatatctctccggatgtggatttcgaaaaatagtaaaattatcaggaactggatccactccacccttgataaatgggttacaccttagtatacgacaaattcccataatcagccccaaaataggaccatgttttttcaatgcatcaatcatgtaattggagcatgttggataataccgacaacttggtggtagtaaaggtgaaatcactgtctgataaatacgtacaataaaaatcaaaatcttacgcaagtaatctcctcacttagtgtcgttgatgcttttcaatatttttaagcaaagtacctgttcctaaagcaactgcttctaatggatgatcagcaattaaaactggaacttgcaaataataagaaatcaacttatcaatattctttaatagggctccaccacctgttagcatgattccgcgatcaataatatctgctgaaagctctggtggagttgtttccaatacttctttagctgctgcaatgattgacatcaagcctggttctaaagccttttgaatctctggtgcagtaactgtagtctgcttaggcaaaccatcaactacgtcacgaccacgaacagtaatttgttcatcttggtctggttcaaaggcgctaccaatttcaatcttaatttgttcagcagttctagaaccgattaacaaattatgcttactcttaatgtaactgatgacagcctggttcatccgatcgccagcataacgtaatgattgagaagttacaatttcacccattgataaaactgcaacgtcagtggtacccccaccgatatcaatcaccatattaccttgcggtttaaaaatatccaagcctgcaccaacagccgcaactttaggttcaaagtctaaataaaccttgccgccaccagacttttcagctgcctgaataattgctttttgttcaattgaagtaactccagtaggagcacaaatcaaaatatttggcttggacataaagccttttacatttaatttttcaataaagtaagacagcattgcttcggtaatgtcaaaatcagcaattaccccattcttcaaggggcgaattactcgaatattacctggagttcttcctaccatctcatatgcctctgaaccaactgcaactaccttgtttgtatcggtatttacagctacaacagaaggttcatttaatacgatacctttaccagagacattgatcagtacgtttgctgtccccaaatcaattcctatatctcgtgccacgataaccctccataattattcaccgtccattttaccataaataatcatgactttcctttactgtccttgttttaacacaatctttaaaacaaattactcaattgcattgaagtatcgataaaagtaatgacaaaattgccaactaaaaagcctaagccaattgcaataaataaatataataattgcgtttcaaaaacatggcctttacgaataattttatctagttgaattgctttaactgcttgaaaagataagccaatcgcaatcaaatatataatgatactaataatgacatgaacgcctaattgaaacatatattttcctcaattttgacaaaaaaagacggatgcagcattttgtgcattcgtctcttccttcttctagtgacctttagtgttgtacacgctaattctgttcattgctcgtcttaaagcaacttcagcacgtgccatagtttgttcgtcatgtttttcccgtgcttccttcaaacgttgctcagcgcgttgcttcgctgcctcagcacgagaaacatcaatgtttcttgcgcgttcagcactatctgcaataatcgtagcaacattattcgaaaactcaatatagccacccgaaatcgcaatatgatcaactactgaatccatttcacggcttcgcttaatcttaacctcactaataactagtggagttaaaagtggtacgtggttatacatgattgaacgttcaccatcaacggcacgtacatcaacgatacttccacgatgtgaataaatcattccattaggagttacaacatctactttaaaaagcttctctggatctgccatttgacatcaccctacttttctagtaaagctttagcttctggatcacttggagttacacccatttcttgtgcttttttcaaaacatcttcaattgggccgacaccacgaaaggcatcttctggtaagtcatcaagatgaccatccaaaataagcttaaagcccttaatgctttccttaattggaacatatgaacctggtacaccagtaaattgttctgcaacaaagaagttttgtgacaagaagaattggaccttacgtgcacgtgcaacgatcaatttttcttcatcagacaattcatccatacctaaaacagaaataatatcctgtaattcatggtaacgttgtaaaacatgttgtactcgagtagctacttcatagtgttcttcaccaacaacttcagggtcaagggcacttgatgaagattcaagtgggtcaacagctggataaataccttgttctactaagctacgttccaagttagtagtagcatccaagtgtgcgaatgtggttgatggagctgggtcagtatagtcatcggcaggaacataaacggcttgaattgaagtaattgaacccttcttagtagaagtaattctttcctgcaattgtcccatttctgttgctaaagttggctgataaccaacggcacttggcatacgaccaagcaaagctgaaacttctgaaccagcctgagtaaaccggaagatattgtcgataaagagcaacacgtcttgaccctcaacatctctaaagtattcagcaagtgtcaaaccagttaacgcaacacgcattctggcaccaggcggctcgttcatctgaccaaataccatggccgttttacttaaaacgcctgaagctttcatttcgaagtaaaggtcgttaccttcacgagttctttcaccaacaccagtaaatacggaaataccaccatgttcttgagcaatgttgtgaattaattcctgaatgatagtagtcttaccaacaccggcaccaccgaacaaaccaactttaccaccacgtacatatggctcaagcaagtcgataaccttgataccagtttcaagaatttcacgactagtagtcaagtctgcgtacttaggtgcttccttgtggataccttcacgagggtgatcttttgaaaattctggaccaccgtcaattggttgacccaaaacgttaaacacgcgtcctaaagtatcttcaccaactggaacggaaattggaccgccagtatcttcgactttcataccacgacgaagaccatcggtagattccatggcgatcgttcttaagacaccatcaccaagctcaagtgtaacttcaaggacaatgctttcatcctctgacttaattacacgcaaggcattgttaatatcaggtaaattcttatcaattgggaatttaacatcgacaactgggccgattacttgaacgatttcaccttcactcaaaacatctacctccttttctttattactctaaggcatttgcaccactgataatttcagtaatttcagtagtaatttgtgcctgtctagcacgatttaattttgtagttaagtttgataccagatcattagcattatcagtcgcactctgcatggctgtcattgaactagcatgttcggcagtcttagcatccaaaatagcaccgtaaatagtagaacgtgcatattgtggtaacaacttcattaacacttgatttggatctggttcaatatcgtattctaattctttatgtgcttcagcttctttgacaccaatatctaaatcgacgattggtaacattttttcaacacgaaaagcagatgataatgagttaacgtggtgagtataacatacgtaaagctggtcatagacaccattcaaaaacatcttaattgcggttgaaacaattggtaaggcttcatcaaaagttggtacatccgaaacaccattcttttcataaacaacgttaatattgttctttttaaagaattgtgccgcaaccgaacctacagcaagaactttgatatcgtgtccttgagcacgttcgtcctcaaagatactcatcatattcttaatgacattgctgttataagaacctacaagaccacggtcacctgaaattaccaagaaacctgttgtcttgatattcttacgtggctgaatcatatctgccgtaatccccaaaccaaagacatcagtataatcaatttgagcaacattgttcttatcaattgagacgtctttttcacgtatattatcaactacttctgagctaattaaacgagaaatagttctacgaatatggtcgttataaacggtataacctttatcacgattttcagtttggttcaactttgaagcagagaccattctcatagcttctgtaatcttaccagtttgttttactgaagcaatttttttctttaactcaagtaaagatgcaggcatattctacctcctatttctcacttggtgtaaagctctcactgaattcttcaattgctgctgacaatttcttatcatctggcaattgaccagtttcacgaattgtcttgagcaaatcagcatgactgctgtcaaagttatcaaataattcgttttggaaacgagcaatatcttcaactggaacagcgtcaagatatccgtgagtcaaagcataaagaatcacaacttgcttttcaacaggaattggatcatgaagtggttgtttcaatacttcaacggttctttgacctctattcaacttagcttgagtagcttgatcaagatcactaccaaattgagcgaaactttcaagttcacggtaagctgcaaggtcagtacgcaaagtaccagcaaccttcttcattgccttgatctgggcgttaccaccaacacgagaaactgagttaccagcatcgatggctggacgagtaccagcaaagaacaaatcgctttgcaagaaaatctgtccatcagtaattgaaattacgttggttggaatatatgcagaaatatccccagcttcagtttgaataattggcaaagctgttaatgaaccgccgccaagtttgtcattcaacttagcactacgttcaagcaaacgtgagtgtaagtagaaaacatcacctggataagcttcacgaccaggcggacgacggagaagcaaggaaagttcacggtaagcgacggcttgtttggataggtcgtcaaatacgattaatacatccctgccattgtacataaattcctcacccatagcagtaccagcatatggtgcaatataaagcattggtgctggctcacttgggcccgcttcaacaacaatggtataatccattgcgccaaaacgctttaaagtttctacttgagttctaacggttgattccttttgaccaacagcaacgtaaatacaaattacgtcttgccccttttggttaaggatagtgtcgatggccaaactagttttaccagtcttacggtcaccgataatcaattcacgctgaccacgaccgattggaactaaggcatcgatagccttaataccagtttgaagtggttgatcaactgattgtcgatccataacccccggagccttggcttcaattggacgactcttgtcagtcttaatttcacccaaaccgtccactggttgacccaatgggttaactactctaccgattaaggcgtcaccaacaggaacttccatgattcgtccagttctttgaacacggtcaccttcacgaatattgtcaaattgacccaaaataatgatacctacatcatttgattcaaggttttgtgcaataccgtatgagccgttatcaaacttcaataactcaccggacaaaacatcgttaagtccgtgagcacgggcgataccatcaccaacataagttacaacaccaacttcgctgatgtcgagcttatcgtcgtaatgttcaagttgttgcttgatcaaggaactaatttcttccgctttaatgctcaatggtttcacctcttttaatttttatcaattatctgcgcacggatcttcttcagtttattcttaactgatccatcaatcacgcgatcttctacttgaagaaccacgccgcctaaaatacttggatcaactttattctctagacgcaccacgtttaggttatatttcttagcaaaactttcacctaaacgcttgagttgatcatcatctagcttaacagccgtagttgcaacgccagatgcgaccttcttttcattatcataaagtaagacaaagcgatcaataatatcgatcaaatcagcaaaacgatcatatttaaataacaaattcaaaaagttttgaacatcatctgaaaaatctttttcaattgcagtcaaaagatcctttttatctttactacttaaaataggatcgctcaagacactaatgatttgtggattggcttcagcagccttttttaattccaccatttcattataaacagtgtctaatgcatcattgtcttgcgcataaccaaatagtgcggcaccgtagcgtgctgcaatttcttctctacttaaagccattaatcatccaaccccttaataaattggtcgactaaatctttttggtctttagcagataaattcttagcaattactttttcagcgattgctacagaaatatcagcaacttgatcgcgtgcagaattcaaagcgtctgcttttgcctgagcggcatcttcattagcctttttgcgaattgctgcagcatcttcgtttgcatttgctacgatttctttacttgtgttttgcgcgttactcttagcgtcagagagaatttgtgttgcttcttgtcttgagttcttcaaggcagcttcacgctcattagcaagcgtttcagctttctttcgttcactagcagctgaatccaagtcatcaataactttttgccgccgcttttccatcatatctgatactggtccccaagcaaagtgcttaataagaagcatcaagatggcaaaacagatcaaataccagatagcattacctaagtaaatatgtgaggctgcaaataatgtttgaatagtcatttactgcccttctctctttaatactattcctttaaacagaaaattatctctttttattaaaggaacaaaatcaagaaggcaacaacgatagccaaaataggaacggcttcgatcaaaccaacaccaataaacattgttgctctcaagttacctgcactttcaggttgacgagccataccttcaagagtctttgaaataactttaccgttacccaatgatgcagccaaagctgctaaaccagctgcaatggatgcagcaagatatttaaaagcttctgacataaatttatacctccaaaaatttattctgtagtaaccttcttaccaatgtaaaccattgataaagttacaaaaacatatgcctggatagagccaatgaagacagagaaaccttgccaaatcatggctaatggagctgccaaaactaacgtaaatggtccaccagcatgtgctagatcattaccaattaaagttagcaaaacttcaccagcataaatattcccatatagacgtaatgataaggttaaaaagttggtaaactcttcaattaaattaattggaagcataaaaccaactggttgcgtatagctcttcaaatatccgccaacaccaaatcgttgtacgccgaatgtgaacgatagaagcaaggtcatcattgcaaacgacattgtcgctactggatcagcagttggtgatttaataaacatccaatcatcaactttgacttccatgaacatccctaattggttcataaaccaaataaacaggaataaaacaaatgcatataatgacaggtgattttgagcatccttgtcgctaacgttatctttaacaatgccgttagtgaaatcaagtaaatactcgaacacattttgtctcttattgggtttcatttcaacttttcttgaaagccaaatgcagataaataaaactgctaaaaccattagcgttgaaccgataataccagaaagttcaaaattcaagcccatgaatttaaaaacaaatgatttctccattacttcgtgacctcccttctcgtgctgaataaaactcgaacacgtaaatcatcttaacaccaaaaaaggtctttgtgtaaaatgaaagcgcattagagaaaatatttttctaaaaaggacgattacttagtaccaaatagtctgtcaccagcatcacccaaacctgggaaaatataaccattatccatcaatttgtcatcttcagcagctgcataaatgtcaacgtcaggatttgcttcttgaactgccttaataccttctggagcagctaccaaaacagcaagcttaatttccttaacaccacgcttcttcaatgcagcaatggcatcattagctgagccaccagttgcaagcattggatcaacgactaaacattcacgttcagcaatatcctttggagccttgaagaaatattcatgtggcttcaaagtcttttcgtcacggtacatcccgataacggcaatcttagctgaaggaaccatttcaaggacaccattaagcatccccataccggcacgtaaaattggcacaattgtcaacttcttaccagcaatttccttttggacagtcttccccattggtgtttcaatttcaacatcttcaagtggcaaatctctagtgatttcataggtcattaacccaccaatttcaccaacaatgcgacggaattcatttgaccccgtatcattgcgacgaataatagtcaacttgtgttgaatcaatgggtgatccaaaactacgaactttcccatatatgcctcctataaaaaataatatgatcattaaatattttaatcaaaaacgcaaagggtttaaagccctttgcgttttattttttatttattgaaatgatgtccacctgcagctttattcaatcgattcatgtaagctaaactttcttcaccttcatgaaatccttgtacataaatagtttcgatatcatcttgatcatcgaaatagcgcaagccaccaaataagttatggtcggcatcaactaaattgttgcccagatcaaatttatttgcttgaggtaaattaattttagctaagactggcgctaaagctgctacaccagttttttcattaaaatcaatttttgcaaaatcagcaggatcatcaaccacgactaccggctcacttggagcataatgacggtatttcattcctggtgccttaggtatatctttgtctgacactttgcccgtgttaattaaaactttttcacctaaaacttcgcttaactcttctggagtaatttcaccaggacgaagaacgattggtgtttctaccgataagtcgataattgtcgattctaatcccacacgagtagggccatcatcaataattccggcaatcttcccttttaaatcatggtaaacgtgctctgcagtagtaggactaggcttagttgaggtattagccgatggtcctacaattggataacccaatttagcaattaaatcatgagtcaattgatcatcaggacaacgaaatgctacagtatcaagtcccccagtaactgcatctggcagagttcctggtttaacaaacaatagcaatgtcaaaggacctggccagaaatgtttaattaatttcttagctctttctggaacttctttagcatacttagccatcatttcttcgtcagaaacagtaacgatcaatgggttatcacttggacgtcccttagcagcataaacgcccttcacagacttttctttggttgcaattgcacctagaccatagactgtctcagttggaaaagcaaccaattcacccttagctaacaacttaactgcatcattgatttgatcttttttaaaaatcttcgtttccatcattcttatttttgccaccttccatgaaccatgcgtggcttgccggccatatcttttctaaattcgatttcaaaatcaggcaattctttagcaaacaattccttcagttgttcttcttcgctaaaaccaaattctaagaaaaattctccatggctattcaaatgctcacgcacttgcttagcaaatttcttatagaagtctagaccatctttgccagcaaaaagagcttctttaggttcattttgcaagacattttcatccattacattcttttcgcttgtcttaatatacggcggattagagatgatcttatcaaattcttctaagcccaacagcacgttggctttacgagtagttacatcaagatcataagttaaaaagttttcctcacttgttcttaaggcagtatccgttacatcactagcatataaagttaaatctgtaatgccttttttctgtgcttctttagctaaagccacggtaatacagccagaaccggtacccaagtcaaggacttgatcacctgatttaagtgtctgcaatgcccattcaaccaattcttcagtttcaaaacgaggaatcaagacaccgcgttgcaccataattttatagcccaaaaaccaagcataacccaaaatatactgtggagatatgcccttagccaatttttcgatatctttattggcctgcttaatctggtcagcagttaagtccatttcttgcttcagttcaaattcacttggtgtcaagcctaagcgctctgctagaacataatcaacatcctcaggacgcgcattttcagcactctcacccgctttaatacgcatctgctttaaagtcattttaggcattttgatcagccaactcctctaattgcttagtttggttgtaaagaattaatgcatcaataatttcatcaagttcaccgttcatcacacgatcaagcttgttaatggttaagccgatgcggtgatctgttacacgattttgtggatagttatatgttctaattctttcggaacgatcaccagtaccaactgcattctttctcttagcatcgtactgagcttgattttgactttcataatagtcataaacacgtgatttcaaaatttgcattgccttttcacggttctgttgttgactacgttgatcctgcattgcaactacaatcccggttggcaagtgagtcattctaacggcactagaggtcttgttaatgtgctgaccaccggcaccacttgaacggtaaacatcaacacgaatatccttaggatcaatatcaatgtctacttgctcatattcaggcataacagcaacagtggcagttgaagtatgaacacgtccttgagattcagttactggaatccgttgaacacggtgtgcaccattttcatactttaatttcgaataaaccttgtcaccagtaatcatgattgccacacgtttatagccgccaacctcagtaggttctgaatcaatcattgaaaccttccagttttgacgttcagcatatttttcatacattctaagcaaatcgccagcaaacaaagaagcttcgtcaccaccggcagcaccacggatttccatgataatatctttatcatcgttaggatccttaggcaacatcaaaatcttgatttgatcttcaagctcgggaatttctttctcaatttcagaattttcttccttagccatttcaattaaatcaggatcagtttcactggagataatttctttattatcttcaatctcttttttgtcctctttgtacttcttatatttttgtactacttcacgcaaatcggcttcttccttagaaatctccatgtagcgcttagtatcattaataacttcaggatcggccatcatttcctgaagttcttcatagtgagctactagaccctctaattgagccataactttatccataaactaaaaatcctctctatctttcaacacctgggtgaaagtaatgatagcgacaaacaggataataactttcatcgccaccaatttgtacttgttcaccctcataaacaggcttgccattgttaattcttaaattcattgttgccttgtgtccacaataatgacaaatggtcttcatctcttctattttatcagcaaaaatcaataaattttcactaccttcaaatagatgattttgaaaatcgttttttaagccaaaggtcattactggaatattgaacacatctacaattttagcgcattctaagacatgatgtctcttcaaaaattgtgcctcatcaattaacacacaagctagtttaccatcaccatcagcaacatctgctttgttcatctttttaatataatcaaatagattcatatcagcagtaattggaattgcttctcggtgaagtccaattctagaagcaaccgttcctacaccgctacgattatccaagccactggtcattagggcaatcttgcgcccctgtgcttcataattgtgagctactttcaagatctcaattgttttgccactgctcattgcaccataacgaaaaaataattgcgccatgctggccctcccttttaacaaaaagtcttcgccttaatagtatagaggaaaaaataaatttgtgtaggtattaaacctcgttttcatcctcgctctatgctaaacttagacatagttttaaagtgagggatgtacatgagttttaaatcaggaattgctaaagttgccggtaaatcaagctattggtttttgcataatgcccttaagggcggcaccagttttccaggcaaattagcaatgaaaattgatccagaagttttaaattctttagccaaaggctatgaaactgttattgtcacgggaactaatggtaagacaatgactactgctttgattgttgaagctttaaagaaaaagtatggtgatgtgttaactaatccatctggttccaacatgcaacaaggaatcgtgaccgcttttttggctcacaagcacaagagagttaaaagaaaaatcgctgttctagaagttgatgaagcaaatgttaaaatggtaaccaaattacttcatcctagcgtctttgtattaaccaacattttccgtgatcagatggaccgttatggtgaaatctataccacttatgacaagatcgttaatggtattaaattagcacctgacgctacaattatcgctaacggagatgcaagcattttttcatcagttgaattgcctaataagaaaattttttatggctttaaacttcctgatgacaaacctgaaaatgacttcaaggctccagtcaatacagatggtgttctttgtccaaaatgcgaccacattttacattatcatgaacgtatttatgccaacttaggcgacttcttctgtcctaactgtggctaccaccgtcctgatttaacttttacagttaacaagattattgatcaaacacctaatagctcaacgttccaaatgggcaacaagcaatattccattaatattggtggtacttataacatttataatgccttagccgcctattctgttgcacgccactttggattaactgaagctgaagttgctcaagcttttgcagaaaataaacggatctttggtcgtcaagaattaattcactatggcgataaggatatcgatttaattctagttaaaaacccagttggtttggatgaagtcttgcacatgcttaatacagaaaaagatgattattcactagttgccttgcttaatgccaaccacgctgatggaattgatacttcttggatttgggatgctgattttgaaggattagacaaagaaaagattaaaaagatcctcgtcggtggtcaacgctggcatgatatgggctttagacttgaaattgctggctttgatccaggacaaatgagtactaatccagatgatgatagcctaattgaagaaattaaaaaactgccaactaagaaggtctatattctttcaacttatactgcaatgcttgcacttagaaagaagatggccgaaaagaaaatcattaaggctggtatgtaaatagaaaggattcccgcgggaatccttttttgtgtacaaaaaagctgtagctctaatgctacagcctttctaattattgggatattggggctcgaacccaaacatccaggaaccagaatcctgtgccttaccaatttggctatatcccagtaaatcacccgtacgagaattgaactcataactccaccttgagagggtagcgtcttaaccatttgaccaacgggcgaatcaacatttataattatgcttttttcttctatgcttgtcaagtaattttgactataataatgctaatggatggtgaaacatgatcgactttaataaaacacagcatttaattgaatcaatggtttttgaacgcgttgttccaggcgtcaattacacttttatcaaaaataagcaaatttttacatcaactactggttttgctagtatctacccagaagttactcagctgagcccttttgcagaatacgacctagctagtttgactaaggttttagcaacagaaaatgtcttgcttaagctttatgaccaaggcaaacttaactttactgagcccttgcagcaatttattcctgaatttaaagaccctcgtgtacgcctttatcacttgctaacccatactagtggcattcgtggctggatcccccaccgcgacaaactagatcatgatgccttactacaagcaattatcaatctgccagtaactgacgaatttgaacacaagatgcggtatgccgatacaaactttatcttacttggattagttattaaaaagatttttggcaaacctgtccaagaagtagtcacagagcaagtcctcaatcaaatgccgcttgaaaatactactttttcaccacaaaaggatgattgcgtgcctactgccctagttgatggccatgtcttgcaaggtattccacatgatcctaaagctagacaacttggaatagattgcggttctgctggcttattttccaatcttcaagacttagttaccttcgcccaaggttatttaggactaaaggatgttttaccttatagtcaaaagactgtcagccagctatttgataataaaaatccccaaggcataaaaccacgctcttggggatgggaccttcggtttgatccaaagcaaaattatccgatcattttgcacacgggttttactggtactttaattattcttgatcgcatcaaacgctctggtctaattttattgaccaatcgagtccatccgactggacacaacactgttttcttagctatgcgcgaaaaaattatccatagttttatcaacgaaaacgccaaaatataatttatagaaaaaagacggctgtgtgtcagtcgtctttttatctctcactaaatttcatcatctgtctagtattataacttattttaacgctaatgtactagtcaaatattatttttctgctttaaacattttccctgaattgtcaaattaagtgcaacagttaggttatgaagagatatattgcttgaagagttcctctgctgtgtgatattggaggattcggcgatatttgtggttaatggcatcagttgcctgttgaacataagcttttgacttgtctttcatgctcttgcccttagggaagaattgacgcaaaagaccattgcagttctcattggtgcccctttcccatggagaatatgggtgagcaaagtaaatctggcagcccttgatcttggtcatatccgcaaactcagagccattgtcaaacgtgattgatttaaaccaggcatgatgtctgtcaatctccttttgaagcagcctttggcatgtgcttgcccgatagtcaggaatcttgataactacttcaaagcgtgtggttctttcagtcaaagtcattaaagcaggctgattcttgcgtctgacgcctttaaccagatctccttcccagtgcagcggagcttttctgtcttcaatctctttaggacgctgttcaatggaattgccaagatgcttcttgtgcaaagcgtgaccgccatggctgtgatgacgcttgttcctgcgtcttttgagcttcataggcagatcaatattgcttatgtccagcaagccctgatcaatatagcgatagacggttggtgtgctgggacaagggtagcctggcatagtccttttgaattcaccaacgaactcatcgatgctggtggcatcaaatttagctttaaagcgtctggagagcattctcaaaaagacagcataatgcttcaatggattgcgctgatagcagtttttgcgacgcttctcataataaatctgtgcagtatcagcgtaatagtgctcatacaataaatagctgctgtctctttgcaggacacttccgcgtttgatttcgcgactgattgtcgacttatggcagccgacttcttgagcgataacagtacgggaagttatgccggaatccagcattgcttgaatttgtccacgttgtacgctggttaattgatgatagtgcttagaaatgctagaatttgaattggtcataaagatcttcctttcttgatttttcgtcacttcaagtttaggtcttcatggcctttttgtttaacacttagtgttgcacttcaattttaaatccgggctttaaacattttccagtagctaattaaaatgattaatgccattaataaagtaaaataaaaggctgcctgactaccttgagctgtcgccagtgcataggacgctgcaccctttttcggccaaatcgacataattgctgctaagatagttgttcctacagaaccggctaattgctggctagtctgacaaactgcggttgcatcggcgcgcgatgctcctttttctaccttcaaagcttcagctagcgtgttagaaaatgacattctgtgtcctaacatcatgatgccataaataataatgatcatcatcacagtcaaatttaagccaaaaatagcaaataacaagcagctgatcgccattaagaagccacctaaataaagtggcaatttagctccttttttatcatataggctaccaaaatatggattgagtagccctgcaataatactacctggtagcaaaatcaaaccaccaactaaagatgtttgctttccgacaatttggatgtagttaggcaatacaaaactgataccaatattattaaattgcaataaaaagtaagctaacgcaccataaacaaagagactgtaaaatagtttgtgtaaggatgaatgattccttaaatttatttctttaaacattagaaaaaggagttcctttctcgtatgattggtttgaacacaaaaaacacatacagaaagaagaactccttcatgaatgattttaccaaagattttgctcaagctctattcaatccagacaaaataaatgatttattgcgcaaagaactacaacaggctgttaataacttgctagaagctgaattgactgcctttctgggctatgatccctatgccagaaatggctggaatactggcaactctagaaatggtgcttatttccgcaaagttgatacgcaatttggcccaattgaagtgcaagtgcctcgggatcgcaacggtcaatttcatcagcacacgctgcctgactacaagcagcactcggatatcttggaaagcatgattatcaagctttactccaagggcgtgaccaccagggaaatagccgatctaattgaaaagatgtatggcagccattacagtccagctcaggtatcaaatatttccaagcagatgattccaaaggttgaggcttaccacaaacgcaagctaagcgacaagtttttctgcgtctatttggatgcgacataccttcctttgcgccgagaaacgtttgagcgtgaagcagtctatattgccattggcattaaacctaatggacataaggaagtcattgactactgcattgctcctagtgagaacattgaagtctggacagagatgcttcaaaacatgaagtccagaggcttgaagcaagttgaactctttctttctgatggtgttgttggcatgaaaacagccttggccaggacttatcctaaagctcattttcaacgctgtttggttcatgtcatgcgcaatatctgcgctaaagtacgcgtcgacgatcgtgaaaagatcatgaacgaattcaaacaggtgcatcaacagacaaacaaagaagaagccacagctgtcctgcatgacttctataccaaatggggcaaggtttacagccatgttatcagaagcttgaaagacatagaaccagatctgctggtcttttataactatcccaagcagatcagagcttcaatttattcgactaacatgattgaatcatttaacaatgtgatcaagcgcaaagctaagcctaaggcagagtttccaactgaacagtcgcttgatgcttttattggtattcaggcaatgagctacaatgaccgttatttcaatcgaattcataaaggctttggtcaggttcaggacaccttagaatcctactttgattaaaagataaataaaaaagtcaatcaacgagagagattatttacacaaacttcttgacagtctctaaacaaacgctttttgcttaaatacggctagatctaacaatttcttggatgattttttagataatctaacaaataaccaaattaaaattgcagtcacaattaataaaatccacattaaaggattagcaaatccattactaatttgatttacgcctaatgtcaaagtaataaatgctatagctaaaacgataaatgatagccaatcaaaactatttttagtttgttcatgatacttaccgactacaaatagcccggcaacaaaaacaatgatcgcaaaaattgtaacaaaaccaaaaatccagcgccagttaagataaaaagtagtgataccgccaaatgctggtcctaaagtcggtgccatagctactactaagccggcgattcccatgtaaacgccccatttttcgcgaggcataacttcggttactaagttaaacatcaacggtgtacttaatcctgcacctagagctgaaatcagccgacttaacagtaaaataggaaaattaggtgctacagcactaattacgcttccaatcataaaaccaacgcaagcaacaataaacaattgccgcgcagtaaaacgttcattcaaatatgaagaacaaatcataataatcgcaatcgccaataaatatcctgttgtcgtccattgaattatatccaaaccgacaccaaattgcttcatcatcgtaggaaaagtgacgtttaaactagtttccgtcaaaattccgacaaatgacataaacgcagctgataatactgctaaaacatttttagtattctctttcacacaaaaatcctttccacaaaaaaagaaagagcaaaaaacctttgtttcctactctttctttaattagcacagctaattatattaatacgcatactatcaaatatgctgagtatatctaatattaaagacgcttagctaagtcgtcgtgtaagttttcgtaacctggcttgttaagtaaaccaaacatgttacgcttgtaagcttcaacacctggttggttgaatgggttaataccgttcaagtaacctgaaatagcaattgctaattcgaagaagtaaatcatgtaacctaaagtatgtgcactttggtctggaatgttaacagtcataactggaacaccaccatcggtgtgagccaaaacaacaccttcataagcacgatcgtttacgtagttcaagctcttaccttccaagaagttaagttggtcaaggttcttttcatcgcctgggatcttaacatcatgacgtggattttcaacacggataacagtttcaaataaattacgtaaaccttcttggatgtattgaccaagtgagtgaaggtcagtagtgaagttagcgcttgatgggtaaatacctttttgatccttaccttctgattcacccattaattgcttgcaccattcaccgaacattcttaaacttggttcatagttttcaacaatttcagtagtgtaacccttacggtaaaggatgttacgaagtgctgcgtattggtatggagttgcctttgacaaatcagtatcagtgtagtcagcacgtgcgtctgcagcacccttcatcaattcgtcaatgtcagcacctgaagcagcgattggaagtaaaccaacagctgaaagaacactgtaacgaccaccaacatcatcaggaactacaaattcttcgtaaccttctgcatcagcttcagtctttaaagcacccttttgacggtcagtagttgcataaattctcttagcagcttcttccttaccatacttcttgattaacttgtccttgaagattctgaaggctactgatggttcagtagtagtacctgacttagaaattacgttaacactgaagtccttgtcgcctaaccattcaatcaagtcataaaggtatgagcctgaaagtgagttaccacagaagacaacagttggcataccgttcttttccttgccatagaaattgctgttcaagaattcaattgcagcttgggcaccaaggtaagaaccaccgataccaatacaaatcaaaacttctgaatctgattgaatcttcttggctgccttcttaatgcgggcaaattcatccttgtcatagtcaactggcaaattaagccaaccacggaaatcgttacctgcaccagttccatcgcgaagttcagtattagcagcgttaaccatagcttgcatttcgcttaattcattttcatgaacaaattgtgttagtttactactatcaaatttaattaaactcataaatctgcttcctaactaaataaaatatttttcacaaacctattttaacaatcttgatttataaataccagtacattataagcgcattcaggcttttttgacaattttaaaaatcacataacccaaaattgctccacaagtattgaagaaaacatcatcaatatcgctaacccccgtcaccagcaaaaactgcagagtctcaattcccactgaaaacagcatccccatcagtaccgtccttaaaaacgttgctctttttgaaaaaacaatggggaaaaaaatgccaaacggcacaaagcacaagacattgccaaaagaattataaaagaaatccaaatgactgggagcatagactaatttccaagtttccttcatgaataccaagttaatatcactcaatggcctagagaaattaaaatcaagctgccacggaaagtaggtatttctaaaagttgtcagcatcaaaactaagattatgtaaaaagaaaagacccaaacgctagcttcagacctaattgatcttctgcggcgcaccaaaagaagccaaattaagcgcaatacagcaaaaattaaaaaataaaatattgttttatccagcgctaataaggttaatttaactaatgcaaagtggttaatattagttgcatactgtttagctaaaaaactataaagtgggcccaaaaatagcatactttgcctctttccaaaatattcattatagattatacctattttcacggctggaaaatcttaaaaaaaagataactcttagcaaattattgttttaaaagaggtgaaccattaaaattaaaagatgttaaaggagcattatatggaaaaaaagaaaattatcagttttattcaaacacgaacgggctttttaacccttttagttgtttgtttctggctgaaatatatttttgcagcttattttgatttcaatttaggcttgagcgacccgtatcaacatttcattatgtggctcagccccgtagggtccgccatcattttaatcagcttcggtttttatattcctaaaccgctgatctcttacatcacaatgttaattttagactttgccaatacggcattgctttttgcaaatattatctactatcgtcaattttcggactttttaacaattaaaacgatgtctaacgttggtaaagtttcgcagggtctaggtaaaagtaccgttgcccttctgcatccaacagatattattatctggattgatttgatcgttattgttactttactgatcattcataaaatcaaaattgatcaaagatcttacggcttatccaccccatttgcgattacctcagtaggcgcatttgtcctaactcttaacatttttttggcagaaacctctcgtccgcgcttattgcgcaacacttttgatcgctcctatgtcgttaaataccttggtattgacacctttactgcttatgattgcttcaagagtgcgcaaaatgttcaagtcactaaaaatgccaacgctgcggacttgaaccagattttaacttttaccaaaaaacaaaatgctgctccatcttcctcatattttggtattgagaaaaaacgcaatgtgattatcatccacttagaaagtttccagcaatttttaattaatcttaaggttaatggcaaagaagtgacgccgttcctaaattcactttatcaaaataaacatacgctcagttttaacaacttctaccaccaagttggtctaggtagaaccagtgacgcggaaaacatgctagaaactagtacttacggtattcccgacggatctttattcacttctttaggttcggaaaacacctttcaagctgcaccgcaaattttgcgtcaagatggctatacttccgctgtctttcacggcaacgtcggtagtttttggaatcgaaatgatgtttataaaaatatgggctataattatttctttgataaaaattactatagctcccaaagtaaagatgcaagcggctatgggttaaaagataagctgctttttgccgaaagcgttaaatatttagagcagatgcagcagcctttctatgctaagttcattacggtaaccaaccacattccgtttaacttagataaagaagacaaggaccctaactttaagactacaaacactgccgaccaaactatcaacaattactttgaaactgcccactacctagatgaggcattgcgtgaatttttccactacttaaagtcttctggtctttacaaaaactcaatggtagtcatttatggtgatcactatgggttaagtaattctgaaaatgaaaccttagcaccaattattggtgaaagctctgacacgtggaatacttacaataatgttcaaatgcagcgtgttccattcatgattcatgccaataatttgaaaggaaaaattaatcatgaaattgctggtgaaattgatgtcttgccaacactgatgcatttgctcggtattaacaataaaaactatgtccaattcggtagcgacatgctttcgcctaaaagacaaaattggatcgtctttcgtaatgggaccattgtcagctccagatatatcatagttggtgctaaaggaatcaaaggtaccgtttatgaccgagttagcggtaaacaaatcattaattttactcctcaagagaaaaaagaaatctctgagctagcacaaaaggccaaggcatcattagactattctgacttattaaacaaccacaatttgttacgcttctacaccccaactggctttgtccctgctgatccaacccaatttgattattccgtcaattatcaaaaaatgatcgctatcagaaatgaattagctggcaattccacctcgctttatagcagacatcgcggtacaactactaatctttaccgtactgatgccgctgaactaaaagatagaaaacaagaaattacccaagttcctgacagcgttaaaaatattaaagagaatacgaaaaacaaaaatagttcagaaaataccaataactaaaaagaacgcacagacctttcaaaaaaactgtgcgttcttttttagtttttagctacaaactgttcatagcccttgtcataaaaggtcacggtgaatgtggaacctttacctggtgcggaaaatacttctactttgccaccatgttgcttaatcaaagaagaaacaatcgcaagtcccaagcctgattcgccagttcccattcgagcacgcgatggatcagccttgaaaaagcgttcaaaaatatacttagtctgattcttgctcatgccaataccattatccttaaccgataattgtgttccatgctctatccgtttacccgaaataataattttgccatcatgagtgaattgaatcgcattttgaactaagttaaccattacctgggtaaaacggtcacgatctgcataaataggcaactgatcaggtgcctctacaaccagctcatcgttggctttagttgcattttgttttaattgcgacttcaaatcatgcagaataattgtggcattaaagttagtcttaaccagcataatttgattatttcgaatcttttcatagtccaaattttcattgactaaccgaattaatcgtttagtttcgcgctgcattaacgcgattgacttcggtttagaatcctctgggatagcatcgtattgcaagccctctagaatgccattaattgttgtcaatggcgtccgcatttcatgagcagcatcagccatgaattggtctcgtcgctcttcttgagccttaacctcttcgttcgactgcttcaaagcctgcaccattttattgaaattctcagccaattgatcaatttcatcgctatctttatgctcaatttgcacattaaagttacctgatgcaactttttgcgtagcacgtgataatcgcttaattcgtttagttgaataataagaaataataaagctcagcaacaatccaaccgctacagtaattaacaatgcacgcaacaaattgcgtttagccattaaaatcggtcgctcaacatgctttactctcgatcctatccaaacaatgccaacaagatttttgccattcatccatggaaccaaaacccccgtgtaggcatccttagttgaactaatcggtgaattttcattatgattattttgaattctaatctcttgcccattttttaaagtagtaaaaacttcttgtgaaagctgaattctagcctttgttttgggataaatctgctcatttttatcattaaaaatacgtaaatgagcatcatcaccacgaagaacatattctaattgattcaagaagttattgctaagcaatgcagtcccattttggctatcagcttccgccaagtttcccaaagaattagcatagctttccatccgctggtagttttgcgtataagcttgattacgcgcataaccaatctctgagtaaccaataatcgagatagttgtcacaataatgagtaagaaactcaacatattttggtaaattaatttcattatttgacctgcgaatcatcaaacttgtaaccgacgccccaaacagtttggatcaccttggcaccaaccttctctaatttctgtcgaagctttttaatatgagcatcaacagttctttcttcaccataatactcatagccccaaactagttctagtaattggtcacgagaaaagacttgtttaggcttttgtgccattgtatacagcaaatcaaattcttttggtgtcaaacccattaccggctgattatcaaataaaacttctcgtctattttttgaaatcttcaaatgatcggtcgtaatctcatagtcttgattatcttcttgagtatgagctggttcttcttccatcatcacgcggcgatgcaaagccttaatgcgggcaatcaaagcaattgggctaaatggcttagtgacatactcatcagctccgatacctagccccaacacttgatctgattcactgccacgagcagtaagcataataattggcactgtcggcgaaattgcccgtacctctttagctacttgaatcccatctttttttggcaaattcaaatctaacgtaatcagatcatacttatccgcgttctttttaaacatatcgacggcttcgacaccatcaacagcaatgtcttgttgccaaccttcttttttgaaaaacattcccatcatttcagctacggaagtgtcatcttcgaccattaatattctcaaactcattatcaatccctaaatccttttgttctcttatgcttcacttgatcaggatcgacatagtcatgtggcaattcatgtcgtttagacaaaaatgttttcaaacttttttcggtataaacaattggcaataagataaataaataaaatgttaacagccaaatgagaaaatagcgatcccaattcaaatagtgaatgattactcctaacagtgcttgaataaacccaaacaggatacaataccagcttgcccgtttctgagcaaacttaaaactatcctggttaacttgcgcaagataagataaatagccataaattcggttgggccttttggctggcgtaatcagccaaatcaaccctaccgccaccataactaagccacaagcgacatagatcacgatttctcactcctaattctgataaatttaaacggttattcctcacctggtgcagacataactattctcattttaccagtgaaagtgaaattcttcatctcatttggaataattaaattagttcccatcttcaaatcatatgacttgccatcagcttctaattttccttcgcctttgataacggaaactaacaggtatggatgatcctttaagccggtcttccaagtaccatcaaggtcaatttgccacaaataaaagtgtggtgaaagtggtggttcaaccaatgtcttaatttctgcatcttgatcttggctagtcttaacatctaacttaggatcaacatggggaacagtggtcacatcaattgacttttgcgtatgaagctcacgctttttaccatccttgcccacacgatcgtagtcatacaagcggtaagttacatcacttgactgttgagtttcaattactaagcatcccttagttaaagcatgaattgtacctgctggcacatagaagaaatcgcctgctttaaccggaacttttctgagcagcttatcccattcgcctttgtggatcatatcagctaattcttcacggctttttgcatgatgaccataaataatataagcacctggatcagcttgcattacataccaagactcagtcttaccagaatcattttctactttgcgagcataatcatcatccgggtgtacttgaactgataaattatcattagcatctaggaattttaccaataatggaaattccttggccttagggttgccaaacaattccggatgcttcaagtaaacatcccgcaatgacattcccttaagtggcccatctgttacagttgacgcgtcatccttgtaacctgaaataatccaagcttctccaacttttccttctggaatatcatagtgaaaaatatcatctaatttacgtccaccccaaatttttggcctaaagtatggggttaaaaataatggttccatttaaatcacctcaattaaagtataaactttaaggcagaataaatgaaacccttttcttagatatatgtatactatttgttttacatgtaaagctacttgttatacttacgaatacctgtagctaatctttgcatcccatccttgaccatcgtcaaaggacaagctagattaattcgaataaaatcatggccatttccacgataaacactaccagctgaaataatcagcccagtttcttggcgaatgaactctgctaattcctgtgaatcagtactgatcttttgcacatcgatccacatcaaatatgtcgcattgcccgaaatgatttgtacttcaggaatgtttttttcaataaaattctgcacatacgcaaaattttgctttaactgttttttcaaagcattaagccaatcatggccttgctcataagccgcaatcgttgctggaatcgccaataaattaggctcggctacttcatcactatttaaaccgcggttaaccatattgcgcaaattttcattaggaacaattgccgtagcagaatgaagagcagcaacattaaaagttttgcttggggacactagtgaaatcacactattttgtgcttcacctgttacagaaaaggctggcgtgtaatctggaccttgtctaaccaaatcaccatggatctcatccgatagtaatgttacatggtattggtgacaaagatccgcaattttttgtacttcttcactagtccaaacttttcctactggattatgtgggttacaaaaaatcatcaaagtcgttagcggctcagctaatttttgttccaagtctgcccagttgatcgaataacttttaccatcgaaagctaaatcactcgacaaaacatggcgcccattattcaaaatggaattataaaaaatattataaactggctcttgtactaaaacattatcaccaatatgtgaaatacggcgtacaattgatgaaatagcagggactactccagtagtaaaaatcatccaatttgtttgtggccgatgattatgttctgtttcataccaatcagcgacagcattaaaataatctgcttgtgggaactcataaccaaatgcacctaatgtcaatttttgttgcattgcctcgataatttcaggtgccgtcttaaagtccatatcggcaatccacattggtaattcatcagacttcacatcccactttactgaatcagtctttgacctatctggtgcattttcaaaatcatattgcatatatctcactaatcctttggtgtttggttcgtatcagaatgaacaatttttgtacctattttcggacaatcaagctcggttttagatggatctaccttatctggatcgataatcaaagtaccaatctcaggtaccgtaattttaccagaaattgggtttttaatactatcaatctttgtattaagctccacatctaaattagaaacatattcaaaagctaaatctgtatgaatcaaggaaccattcttaatctcaagctgatcaatgtagttcaagccctgatcactttcaattttacaattaattaacgtaatgttgttagtattccaagctaaatattcaccatcaataattgaatcgtaaatagtgacattattgcaattccaaaaagcatctttagaaataaaagttgaattatgaacttcaatgttttctgcaccatcaaaaacataatttcccacaacggaaacgtgatcaagataaatattctggctatctttaccaaaataatcaccattaatttgagaattggtaatcttaatatcattacaagtccacattgtttcttctgcgttagcaaaatgaacattatctaaaataatatgaattgtccttctgaataatttaggtgcctgtaaagcactatttttaattgaaatattcttggtataccaaattccagaccgtgacatagtttcaaacgtggtattttcaactttcacattttcatcataccaaagtggatatttccatttaaaaattgaattctttaatctgatatttttagcttcttttaagggagattcaccactgccaaatgtaataccatcaaggattgcatcagttaatccataaagaattctttcacctgcaaaatatttatttttgtattccataattgtttccacctttttgttaatttaataatcattaattttaggacagtattcattatatgatttctttcatgcaatgtttaatacttatttttagtgataatgcataacaaaaatgcatagcagataaacgatttagcaaaacaaaaaaccgctctagaacaacatctagaacggttatctatggagatgaggggagctatctttacttttagttacttttaattacttctaagtactgaaattaagccattttgatgtttgttggttttagttaattttgaagttggatacctttttggataccctggctaacaataaaattcagacttagaagctttgtcttagctcccaatacaaaaaagtcattctatgaaacttgattctagaatgacttttaatacaacaatacatatagtttaaatatatgttgttagaattcattgtctacaacttgccttgcaaaatcacatcattcaagaaactagaagatgagctatatccatgttcttttgcaatctctgtcaatttagttcttgcacttggcatcaaactaaaagtgtaaggtcttctcttttctcttttaatataattacttgattctttagaagatatttccttaccagagtcatcattaactctaggtgtttccttcaatacttctgcaaactttttgccttgatttgggttaaaactcatagaaaaaatcccccttaatcattactgtactatacctaatttcttggtacccaaaacaacatatcctggcgcttgtttaaaagtcgtcatataagtgatcaagcaatgaacctcacgccctgtgtaattttctgttgttggatcatattcttctagcaagagtaaatcacctacttgataattacgatcattttttctaatttcaaaatttttagagttatttacttgtgcttcaaaatagctcgggaaaatttttaccctatgttctttgatctcgtatacgccactcgatgtatatactttcattagcattacctcatattttatttatacattacatatacttagtttatatttaatgtatatttgctttatacattatttgtaatgggagaccgtaaaatgagactgtaaaatagtttgtgtaaggatgaatgattccttaaatttatttctttaaacattagaaaaaggagttcctttctcgtatgattggtttgaacaaaaaaacacatacagaaagaagaactccttcatgaatgattttaccaaagattttgctcaagctctattcaatccagacaaaataaatgatttattgcgcaaagagctacaacaggctgttaataacttgttagaagctgaattgactgcctttctgggctatgatccctatgccagaaatggctggaatactggcaactctagaaatggtgcttatttccgcaaagttgatacgcaatttggcccaattgaagtgcaagtgcctcgggatcgcaacggtcaatttcatcagcacacgctgcctggctacaagcagcactcggatatcttggaaagcatgattatcaagctttactccaagggcgtgaccaccagggaaatagccgatctaattgaaaagatgtatggcagccattacagtccagcccaagtatcaaatatttccaagcagatgattccaaaggttgaggcttaccacaaacgcaagctaagcgacaagtttttctgcgtctatttggatgcgacataccttcctttgcgccgagaaacatttgagcgtgaagcagtctatattgccattggcatcaagcctaatgggcacaaggaggtcattgactactgcattgcacctagcgagaacattgaagtctggacagatatgcttcaaaacatgaaatcccgaggcttaaagcaagttgagctttttctttctgatggtgttgttggcatgaaaacagccttggccaggacttatcctaaagctcattttcaacgctgtttggttcatgtcatgcgcaatatctgcgctaaagtacgcgtcgacgatcgtgaaaagatcatgaacgaattcaaacaggtgcatcaacagacaaacaaagaagaagccacagctgtcctgcatgacttctataccaaatggggcaaggtttacagccatgttatcagaagcttgaaagacatagaaccagatctgctggtcttttataactatcccaagcagatcagagcttcaatttattcgactaacatgattgaatcatttaacaatgtgatcaagcgcaaagctaagcctaaggcagagtttccaactgaacagtcgcttgatgcttttattggcattcaggcaatgagctacaatgaccgttatttcaatcgaattcataaaggctttggtcaggttcaggacaccttagaatcctactttgattaaataaataattaaaaaatcaatttacgagaaagatctatttacacaaaagatttgacagtttccgtaaaatagtttgtgtaaggatgaatgattccttaaatttatttctttaaacattagaaaaaggagttcctttctcgtatgattggtttgaacaaaaaaacacatacagaaagaagaactccttcatgaatgattttaccaaagattttgctcaagctctattcaatccagacaaaataaatgatttattgcgcaaagagctacaacaggctgttaataacttgctagaagctgagttgactgcctttctaggctatgatccctatgccagaaatggctggaataccggtaattccaaccagctctatcataaggatcataacctaaaaatgcggttaattcagcttctaatagatcattaactgcttgttggagttctttacgcaataaatcgtttattttgtcttgattgaatagagcttgtgtcatatttttggtaaaatcattcatgaaggaatctcttttctagtatgtttttcgttcaaatcaatcatacgggaaaaggattcctttttctaatattcagggaaataaaattaaggaaatattcatccttacacaaactattttacagtctcattcatatgctatgtataagttatttatgtttaacttatatttatattatatatcatatttacaatatttcaacaactatcgtttttatttttataagaattcaagtgtaaaattaaaaaagataaaattgctgttttctaacaccttctattttttaagctttatttgtaccataatgacatcatttgtatgttataatgatgtcatagcgtaaaggagtgattgttatgacatcatcaactacaatccgtcttgatgacgatttaaagagaaaaatgcaaaagattttagatgctgcaggcctttcaatgaatgcatactttgtaatggcagctaaacaactggttttacaaaaaaagttccttttgaaatcttgactgaaccagaaattcctaataaaacaaccgaaaaagcaatgcttctagctgatgccaaagatgagggcttggttacagatgattcgcctagttttactaatgtcgatgatttaatgaaatctttggatgagaactaatgtacactatcaaatacgagccacaattaaaaaaagactacaaaaagttcaaaaaagaacatccagagttaataaaagattttaagaatacagttattcagttaacccaaaaaggaaaagtcggaaaggactatgaccttcatccgttagataaacgtggtggtaattacagtggtcattttgattatcatttaagtgaaggaacggtcgatgttgtagtgatctacaagccacacaagaccaattcaataattagatttgtgagaatcggaaatcatggagacctatttgagggtaaagaaaaataaactatataaatacggatatatcagtatttttgatatatccgtattttgatatacgaattagaaatttagattttattctttttaaaactccgctcaccatgttgaaaaatcgataaaaacaatgctaaatgtagaaaaaagaaaaaatcatagtagtaagactttaaaaaggacggtagaactactttaagtactacaaattacaacaaaaattttataaacttctacttcattaagaaaaaatcctgtaatacagggctttttaagctaaaacgcaacttttacattttattaattagtgattcagtagttaaaatttctctatccttatactttacagcctcagcaatcgtcagtttttcaattgctctaatgtacttctccatgtaattaaagtctaaattttttgtattacttacaactggtaatcttacactatcacttcttattttggcttttgaaatggagtcatcccaactatattttttagataaagcttttctaacacttcctacaaaatattgttgaattagagggcttttatatcttgaatctttaaaatatagtgccaaattatgactatcattcgaacaaaaatctttttcttgataagttactaccatagtttttccaccaatgaaaacgcaattgccctcatcgatccattctttaggacaatttatgtattttaaaacagcattattgccttctgctgctgtcaagtatggcacattgccattttcaaggttagctacttgactcttcaatatactatgagtattaactacattaaatagatcaactattttaaattcttgaaatattggcttatatgctaatattttcttgtcttcatcagttagtccatagtcatttaatcctgtagcttttaaataggaatcaagctcggcgagccgttgctgttcaagctcggctatatattgttccatataattaaaatctatttcatctgcatcagttacaggtagcctcaccttagagtctctaaacacattatccacgtgtctaacaagaacagacagtaacaccttagacaatctactaaaaatggtattaaagtacaacgcaattttagtattaagtttaaatttgggaataattttccttacgaactgtcctgcataccaagaacgttctcgataaaagaaagtcatttgtaacagccccaaactaaacgtattaggttcattgtaggggacatcacatacaaagtctgttgtgctttcaatgccattattcaaagatgttcgggtaacatagtcatattcatttgtacttatattaggatttactaatttagacttgttgataccttttaccttttgtatttcaaataaatcacctaatttaaattccttatacttaaccattctgaccacctataacttgactaaccttccacgatagataatctgccacagtccttttaaagtcctcttctgcaggtgttgtgtcaatttttaaatgctggttataagtccaatcattgccttctagagtgattgtatctttaattactttatggtttcgttcagtatagtaattcgttttaggctttttatcactaacaattgcaactacttcttcataacgttctttggcatgatctgtatcacgtaaattaaccttctgaccagattttttacggttcattctagtatatccatcttcactaaaatctaagaaggttactaaatcatcttcttcatgtggtctagctactttaaatacataaatagcagtctgaacactagcttttccaccaaataaatcagttggcatatgaatagaggcaactaaagtattatttttaagaatattttttgtgtaaggcagcccgttgccactaccagcgttttcttgaataataattgccgcatagccttttgtcatttgtgacaatgcttcttgaacaaaaataaaaccttttccttctgcagagtatggaggatttagcaaaaacacatttgctggaaactgtgtgtaatttttatacagctcatgactattaccattaaccatattgctagatccatctcccattaggatcatgtttaaaacggctaaaatgtaaatattgcccagtatttctacacccagtaattgattttctttaatattttgaatcttgcactctagtttctgtttatcttgaattgtatttttagcatccttaaccataatatccattgcagacactaaaaatcctgcagatcccattgccaaatcccacacaaacgaatctttatttgtatgagctaacctagccatcatattcgttatgtatcttggtgttaaaaccacatcattttgacggtcattatcaattgatacccaatcatttagagagttcaaaattttaccagtaaaatctaaatgcaaatttgattcaagcaaaggaagtatatcattatagacttgcacatatatcttatgaatcaaactttcaccatttttaggttgccataaagcttgtttagtaaaaataggttgtaacaaagccataatcatgttaattttgctattttccgcttttcttgcatttaggaaatctgcaatatgatttaagataatttgtccatcattgtttctttcagttatatttccttttaattcagcaggctctaactgtgatactccttttgtctgtagccccgccatgattaaaccagtaaaaacatacaatttttcattagttgtcagtaggttttgaattgacttatcgtcgtacaaagcttgatgaattgattttatccttttttctaattcatcctcagtttctaatttaattttttcgagttcatggtcatttagatttagtttgtctaatatgccaaaaagggtatctatattgatttgcttaaacaaatcaaacgatgaatctagctgtctaatatgttttggaacaccagcattagccttagaaatataataagctttctgctcaggatcttttaaattgccttcagtatctaaagtagtaccattaattcccattatgataacttcatcacagtctgagttatctaagatcgcatttccataatgcagagcaccattagtagcatatgtagtaattgcactataattaggatcaccttttttatgtggattttttgcgttcggcttagaatctgaaccaaatttagtcacttgaacaatttgaccagccttgtctaatttttctaacttatttttgccacctttagcttcaatcattactggtactcttcgtgaatgattatcttctaataataattgaatatcaggataattgttgcctgcaccaccagatttagattcagcttgtcgcaaggctgatgtaatttcactatttatttctccagttttaccgtaatgcctaattcctagactatcaagttcactcttaaagtattcttctactttttcttcaattgatctaaccatttatcgcaccgccttttgttgcatgcagtgcgtaaatgttgacaaatgaattatttgcccataattgatgtgatgtgatcattttattctcctgttcaattcttgcaatggttgattgaattgtatgcaactttttagctaattctgtttggtgttattcctgcgtttcttcaattaatttatctaatacccttttttatgggcaattccactagctatatgattttactttttttattatatagcatgtcaacaatagtttgccatactaaatggtttttaggatcttaggcatttgatctttatttaaaactaaatttgtgaatcctattgaaaagccgtcagaaacaacactaagtgtagaaaaaataaaaaatcatggtaatacgcgtggtgctagttaaattgttttagttaacaaaaaaagtccaatcttgttagactcgacttgtaaacatattaatagaaaagagtctgactagattgaactaccctaagcttaagcgtttttctcatcctaacacaagttagttttagttgtttaaatataatttatcgctgtttgtacaaactttatgccccagatgcattaaagcaaagacggaatatcaatcgatgtaaaatatctgacagttctattctggccttgcttatttggcaggctttattgggcgttgaatctcaaagaagattttgtgaaaagcttgttaatttatctcactctcgctttaatcgcagagcacgcatgcttttgccattgatctatttaattcgacatggccttaatgaggaagtagatctgtcaggcgacattttgattattgatagctttcctgtgccagtctgtcagccaattcgcaatcgtcgagccaagatctttcgcggctatgccgatattagctataaggcaaccaaaaaaatctattattatggttttaaggttcacgctattgttagcgacgacggctacttgctagattatatcgtaaccaaggcctcagttcatgatgctaaggaaacagtagaactgattactaacgctcatcctgacaatcgttaccttttgggcgatgaaggatatttgggcaaaaacctgcataaacgcttagagcaaatgggctatacgctttggacaccatatcgtaaaaacatgaagaatgctcaaaagcacaataagcactatttaatggcactcagaaggaccatcgagagtgatttttcgcttttgtcttactacaacgctgaaaataatcgagctagaagtttagcagattttcaagagagactcgaagttgccattttagcttataatatggcatattgtctagaacgatttaactagcaccacgcgtattatataagtttatttagatacgcttagcatggtcttgtgaatgagcattgttttgaccataatatgcattctcaccatgcttacgataatagtgcttatcaagcaagtattgtggtaaatgactattagcgtgggttaattctaatgtatggaagtcctcttctgctacgacttctaacacttttgcattatatactgccttagcaggtgtttctccccaggtaaatggtccgtgctgggaaactaaggtgcctggagttgcttcataatctaaatgacgctcttcaaaagtctttacgatagtaacacctgtattaccttcataatcttcttcaatttgttccttagttaaggcatctgcagcaggtatatcggtatagaaagtatctgcatgggttgtgttcattgctggaatatccattttagctgcggcaaaagatacagcccaaggtgaatgggtatggacaataccaccaattttagggaaatgattatacagatacgtatgagttggggtatctgaagatggatttcttgttccctccactacttcacccttcaagttaacaactaccatatcgtcaggagttaattcttcatatggaacacctgatgtcttaatgacaaatagacccttttcacgatcaattccagatacgttaccccaagtaaaggttactagtcctaacttaggcaattgcatattggcttcataaacttctttttttaaatcttctaacatgattgaaccactttctatctcactgaactgagttttttattagtttatacattttatctgtatcagtttcgcttaaaatctgatcatataatctacgattagtaataatgttaattaactgtgttagtgccttatcatgctcatggtgaaagccaggaacaagtacaatgacacactttattttttcttctatattattaacggaaattttaataggtctttttagaattccaatttcaatttccatttttcttgtatgcttagatggtgctgcgtgcgctaagaatgtatcagatgaaagcaacatatatgggccatatttatcaattaaactcaagatatcatcacaataaccagaggtaactatattctttttttctaactcttcagatagctccttaataataggattcaaatccgttccattcattagattgtcaatgatttttatactacttctattcagaagatccatcaaattgtgtttatttttatcacgtttaacagtatcttttgtaggatatagataattatctaaatcttttcttagattagaaatattctttatttgagcatttctttgaataatgctaatcaaattatctaaagtcttttctctattaatgaataactgagggaaatagtatcttaattgattctcaacttttacatgatcctcactgtccatcattgccttaacttggactacaggtaaatcaatattttttgtatttaatggagaggttgtaatgattaatttagctgtattagggatgcgtaaaattttatttaattcatcgatacttagtgacttagaaaatgtgattaatggatattgtttgtgcaaattagaataaagaatagcagatgaacttacgccactagtacatactaagagaacttccgattgcaagctatctctaatattatcgtttctatctaaaacatgagatatattatctgatagatcatcgtatgaaatgaagtacagactgatcaaagcaatttcattaattgaaataggtttagaaaacagcttagctaatggactacaagataattgtacaaacttaaccatttctgggaatttatggacaacatcagataaagcttcagaattaaagtcaaaattaaacttacttctaaaataactggcatataagtgattacttaaggctattacaaactttggagattgaatttttatgcctgaaatagaagcgtatctattaacaatgtcttgcgctacatctaaaattttgtctttaaaagattctgtaacgtaattaactgcgtcggcttgcgagcaaagaattaattcactaaaaaataaaatttcacttttaattccaatcccatatctttgcgtaaagtctgtaactgcagataaaacattaacggtactctcttgaatatcattatctgttatatctatgtcaacaatcatatttcccatagaaattcgccatattctaaatttaagaattctctttaatttagaaatagcgttttcggtaaatcgtgaggaaatatcttcctcgagaatttctatatcactttttacttttgaatcttcaataattggaaatggtaacttatctattttgtgtgctattaatccactattatgtttttgcagctcattgaaaataaaacgacttttctcttcttcagaactttttagtagatgaccatttgagtcaatatttagctttagttcagaataattttgtcgaatgtccttcaaatcatttattatcgtatttctagaaacatccatatcatcgattaattgattaatagttattggactattctgaataaaaaatttccagataatttccttcaatctgttttgtttattttcgttatgttgaaggttcttattttcattgatgttttgttgcttccaagcacttatagcttgtgcattgagtatatagcctaaatttctaacattttttataggggtaatatcttttgatgttaataaagcattagccttttttatccgataaaagattgttcgttgtgagacatcgaaatagttacataattcatctaacgtcacatatcttttttgctcagcaaaataattaattaaattgcgggtgtcaattgattccatctattatccatatcctaaaaaaatcgttaagacaatatctaaaatacttgccttaacgatttctaactctttaaactaacctttgataatttcttctacttgatcaataacgtcatctacgccaattcctgtcaataatggcaagccatttaaaactggaatcttgatttcatcattgtcatattgagtagtagtaatagcagcatctgcttcatctgccattgattgtacttgttgtacacttgtttgaactaatttgtaatcagtaccttcgttaaagcctctatcagttagctcttcgtttaacttattcatggctgctgtactagtaacaacaccagcgccacatgcgacaataatctttttcataattaaatcctcctaactttattaagcttttttagctgcttcagcttctttttcagccttaataatgcagtgacggttccacattactaagataccacaaactacaataccaataacataggcaagccacttattgtgtgccatttggaacaatatccatgggaaaggattagattcatagtcaattgatccaattaatgttgagttctttggaatagcaaagtgagcagctctagcagccttagtaaagaatggtgataagttagtaccaatccacaaaccaatgattacgttaattgcaccaataataaaggaacggaagaagtcgccgtgtgttactgccacaatcaatgggaacatgaagacaaatccaacaagtccaatggttggtaagaatttattgcctggtaaaatgaaggcaaataccaaagataatggaatcattaaggtagcacaagccaatacaactggactaccgatacctactgcagtatccataccgatgtagaattttctaccaccaaagcgtttttgagtcaatttttgaatattattagatactggtacaacaccttgtaataataatgcagccatttttggggtgataatcataacggctgacatagttacacccattaacaaaatcttacctattttgtctggccaatccatacccggaacaaagccatatgctaagaatccaactaacaaaccaattacgaaacctaaaagtgtaggttcaccccagttaccaaacttcttgttaaagtctttagcatccaagtgaatcttgttaacaccagggatcttatcaataatccaattaattactacggcaaatggtacaaaagaacctgcatatccatgaggaattgagattcctggtaatcctaagtacttttcagacaaaggtgcagttctgtcggcaattaccatgattacgaccatgtttacacttgctaagaaaagactaagcaaaatgtcatcagtcaaggcatatactaatgaacctgtaaaagcaaagtgccaaaagtcccaaatatcaatatcaatggttgatgttgttttggtaaacagcataatcatgttgataatgatacccaatggaatcattgtaacacctacaattgaaccatatgcaattgcagatgctgaaggccaaccaacatcaataactgacaaattgatatgcatgactttaatgatttcttgaactgctggattcataacatcagttaatattgtaacagttgcatttaatcctataaagccgattccgaccattaagccgcctcgaagtgctttagcaaaaggtaccttcaaacataacccaaaaatcaaaaagataattggaatcattactgttggtcccaagttgactatatactggataaaatcaactacatatttcatttaattccactcccttttagttaaagtacgatgctaatgcatcatataattcttttgaatctttatattccacaagctttgacattagttcttgttcttggaacatttccataagcttttgcaatagttgcacttgactatgtggttctttcatagctagcattgctacaaatctaacttcaacatcttttgatttatcagccatatttttgaaaaacactggctttttcaatgtagcaaatgcaataactggcttattcacatacttaacatcagtatgtgggattgctacgccaccttcaccgcttggcaaacctgttggaaaaatctcttctcgatctaaaacagcttgcttatagctttcagtcacaaaaccttgcttgaataactgatcagctaatgtagaaatagcatcggtagaatcactaacatctaattgtgcaaatactaaaccatcttttacaaaactcaatcttatttcacttcccacttcattcatcacattcatagtaaaataaaaccgcttttataaatagttcaattagccaaataaataactgcaagttctgcaccccttttgcatgcataacttgcagttttattgctcttgtgaaatttgtactattctattacacatttgcctttgcagttttaatggtaaattacaaaatctataaccattaattctgaatgctcctgtaaattaattaattcgaaattattatgaataaaatcagaaattgcaataatattgtccgcacctgttattatttcttccttttttattagctatttcaactaaatcaatctttaatatttcgccattaagcaggtatcgttcgactattttagattgatctactaaattacacattttgaaccagctaagatgatttatttcaaaatggccaataatatatgcatttacagccatttctattgaaaatacgtctttaatcattttgaagccttcttttaaatctatgccgtttatttgctaaatcttcttgcattgccaagattattacttgtcatagattaagtttttctttttgtagaaagtcattacatgctttaatagcagcaagaacaaaattagtcatttttcctccagagattttgttacctacaggctgataatctatttcaccagtctcatacaataaaatacgcgtggtgctagttaaattgttttagttaacaaaaaaagtccaatcttgttagactcgacttgtaaacatattaatagaaaagagtctaactagattgaactaccctaagcttaagcgtttttctcatcctaacacaagttaattttagtcgtttgaatacaatttgccgtttgatatacaaactttatgctcaaaattcattgaaacatcggcgaaacattgatcaatgcaaaatatctgatagttccattttggctttgcttatctggcaagctaccctaggcattgaatctcaaagaagattctgtgagcacttttctagtctgtctcactctcgctttaatcgtagagcacgcatgcttttgccattaatttatcaaatccgtcatgctcttaatgaagaagttgatttatcagatcgcattttaattatcgatagttttccagtaccattctgtcagccagttcgtaatcatcgtgcgaagatttttcgtggctatgccgaaaagctactaaacaaatctactattatggttttaaggttcacgctattgttagcggtgatggctacctgctagattatgtggtaaccaaggcttcaattcatgatgcaaaagaaacaatagaattaattgccaatgctcgacctaaaaaccattatcttttagctgatgaaggctatttaggtaaagaactgcatcaacaattgatgcagatgggatacttactttggacaccttatcgaaagaatatgaaaaatgctcgaaagcacaataaccaatatttaatggcactcagaagaacgattgagagcgacttttcgttattatcttactacaactctgagaacaaccgagcaagaagcttagcaggttttcaagaaagacttgaagttgcgattttggcttacaatattgcatattgcctagaacgatttaactagcaccacgcgtatggtaatatatgaaagtacaaaagaagaaacatcttgcatatgcgagaaaattaagacacacaaaaatcgctactctaagtccacaaatgagtaacgatttttttgtttcaccaaagtttaaaacaaaaaagctatatgcattggctaaggatagtgacgcttgtgatgttttcttgagttttgcttatggattttacgcctatggctattttgagcaaaaatcaacttttacattttattaattctaattgctaatatacttacttaatcttgacgcaatgcacctttaaccaatctgcagcaaaatacatattctcttctgaatcctcactattagtaatatataaaataaactttaatgcatcgtctttatcagcttttaagtgatatccattttcttgtaaaaaaaacgccgctgcataataggaagtccgtttatttccatcagcgaagatatgctttttagtaatcttctgtaagataaaagccgcttttaaccataatgttggatataattcacgtccaaataatatttgttgtggctgtttaacaacaacgtctaacccctctggatactgcacacctacagtacctttaccagctttttcaagcaaccgttgattcaaatggattaaatctgttttggttaaatagatcatttattctctaactctcgtgttaattctttattttcttcataaaattgatcaataaagttgtccaaattgggattaattgaatcaactattttaaacgtgatcttcttaccattaggatcatattctttttcaagaactgttccatcttctacatgaaacttagttaaatcttgcttggttaaacgtacactcaatgaattaccagctttaaaaactttagttgtatcttgtaacattttaatcacctgctttgccatttaattgttataacgcaataatacgatgttataacgtgaatgtcaatattttaactttttttattatatagcatgtcaacaatagtttgccatactaaatggtttttaggatcttaggcattgggtctatatttaaaactaaatttgtgaatcctattggaaagtcggcagaaagggcactaagtctagaaaaaataaaaaatcatggtaatatgaaggtacaaaagaagaaacatcttgcatatgcgaaaaaattaagacacacaaaaatcgctactctaagtccacaaatgagtaacgattttttgtttcaccaaagtttagagcaaatatgtttaatgctttagctgtatgttatcacgaaatcaagtggctatcataatattgtctaaagtcctcggtactgaaagcacctgaagttatttgtacaatttcattaagcgctttttgctcactgcattttcgatatatcattagacgctttgttctaatcctaagcgaatgaagcatccattttatattctcatccaccagcttataatggctttcaattaaaagagcttttgcggctttttcatactcgtctttcttcatatactttctcctataaactgcttatcaagaacacggctaaattattgccaaggtgacttacgtaagagaaggtcaaatccttagtttcaagataaactaaagctaagacagacccacatagtgagtacaaaatggtatataaatcaatttgtggttcatgtaaaagtccaaaaattaatccattaatgagaacagcaataaacaatgttgattttttgcctggtttactaaaaaaccaattgaaaaaaatacctctaaaaataatttcttcaaaaagtggtccaattgcaatcagcattatattaataattggattcaactgttgctgatgtgcagctatgtttgcttgattagtggcttcccctttaatcaaaaatcctgctaaaatttgcaaaatacaaattactaaaaatccaagaaaagctaaactccaattttttaaagtaaatcttggcattctagttttattgtaactagtaaagtgccaatcattcacctgattaagtcttctttggtaaattccgtaggtcaagctcagtaatgcaaccgttaatccaaatataaatataacggcaacccagcttaattgtttggctctaatcataaataatccttgaactaccgcataaataaggaaagttactatcatttgaccaataccaattgatttatcaagaatcttttttttcatcttttagttcctttgatttttttatgtctgattttagataccctatcgacaagagaaaaatataaattattactgaaataccaaagccgaccgtcgcaaaattaatattggaatttaaatgcttcgtagaaaccttgcaaattgattgcgccaaagcacctgcgttagcagaaacaaaaaatgcaaacatagttgcaataaacagtgctgttcgtcttagaaaggacaaaatcatatttattttcataaactacctctacttagcaaatttctcatcaaaaccaaaatattttctgccattgtatttcttattgggattaggcttaatctccattcgataggtacctttacgaccattgaaagctacaatttgcttttttcctgccgcaattttcttaatctcttcaggggtccaacgatgacctcgatatgttttcttaaaatgatattctttaccgtctttatatgtaatcactacatagacatttgtatctacaggtttaggattaactctaaagccccagaacctgattttacgtctaccttctttcaattcttgttctatcaattttccagtagccgtaaagctttttccttgcttatcagtcgcttcaaaactgatttcttcacctgccaacaagctggtaatttcttcctcactaaaagcatgttgtccatattcttttttaaatttaatctctttagctaaaggcttatagattcctttaacgtgatcagtatcttcaggaaactctactttccaaccaactctggtaatctctttacccgtttttttacttttatacgtttgttcggctaaataagccgtatgttgttcttctttaccaaatttttcaatcgaataggtgatttgtttcccttctaaagcttcttgttgctccacttcagtagtcgtatgtccatcaaaaatcgtaactggtgggtttactgtttcatttgtttgagtaaagactccgctaaatctttcaattgcctttaaatcaccagctaattctttaacttgtgcatcttgatttaataatggggcattttctatcataactgctttatcatgttcaattgtcttttctgcaactgagtagaccatatcttgctttgtgggatcagccttaatttcattcaaaatgtcttgcaagcgttttgtaatttttcctgaagacaaataggtatctttagctaagcaagcaatcaatgcgccagttcctgttacttcaaaaacacctcttactacttttaattggggaataacttttttattttctttaccaattgcttgtaatttactaattgtttgcattttagtcgcaccagtacccaagttccatttatccaagttattcaaaatgaaagttaaagtaggtttagttggtggcgtatttgtaccttgatatacttcagggctagcgttttgagcaaaatgtgtagccttattttctgattgcttttcttcatttaaatcattttcgttaaaaatcagcttatagtttagttccttaggaacattaatcgtacttgtaaaatcaggatgatttgcaatatgggctttaacttgagtatatacatagtcctcagctaacattgctagatatgatttaacaactcgttcataaatatctcgaccacatttaccatatttgtcttcaactttttcaagtgattgtggtactaatttggtcggacgattggctccgtgatcctcactcttaattatgaattttttgcgtgggtctttatgacttaagagttttgaatcaattccaacgactgctgcaattttatctgcatatggtagtaactcgttaaaatcatcaatcgtaattgcgttgtcttctgttctcggataagaaacaatcttatcatcatacattttttgataagtatcagtaatttgttcagttgtatattccttttggaaaatcttacctaagtcagccaagttgactaactttggcggctgggttcttttttcagttgtgctatcaataataatttgatcttgagaataattagttaaatcttgacctactagatttttgtctgaaaaacgccaagtatcaccgtcttgatagtcacgcttaaatgtattgccgtttgcatccttataccttatttcatagaaaggctttttaacgtatgattttcttgctctgttttgctcatcaactaagcacgtaatatacgtctgcaagcgtcctattgaaagcgccttacctttattactataaccctgttctcttgccaactcagttgcaattcttgattcttctaatcctgttagaaaatcaaatctctgtcgtgattttccttttactaaaattccttgagcatcttgttcactaactgtagccttctcaggcttatgtaaggaatcaattacatagttagctgagtcatcacctttaaaacgaattcgccagacttcattttgccagtttaaataatctactatttcccaacctaatacatcaccttcaccagacgggtcattatcgcttgcaataataattacatcatgtccaggcaaattgctcttaatattatcaatgtatctttgcttggacttaataacttgctttgaccaatttaaatcgagaggattccaaggaaagttatctaaattctgccaatccgcatatttagctgcaaggttggggtcaaccatttcattaggcgcattgagttgtaataaatgtcctgcggcataaacaatatcatagggatttccttcaaattcgccactcattccacctaaataatccgcaaatttttctgcttgagactttttttcatttaaaataagtaatcttgtcacgttactattcctttctacaaaaaaagaatacctcacggtattcttcacatagcatactcattattcaaaaaaattaattaatggaggtaactatattatatatcatttttatgatatttaaaagcttagtaaacctgcttaatgctttccaaaataactttattcatttgactaattatctttctaaagtagttgtacaattgttgatcattgttacaattgaggtacttagaataccaataaaagtcgattcccttattttctaatctttccttttctttttgataaatcttatcactaattacataaccataatttttaatccaatcttgattaatataagtaataaagtcgcttgcctgatcatactttagtttttttacgtcaaaaccataattaattaatttctttttgatcacaactaaattatcaattctgttaagttgagctggtttaactaaatcaatcacataataggaattaaacaaacctcgtaattccccttctttattaggtctaacaacgttgaacaatatatcttctaatcttgtgacttctttcataactgcctattatttctccttaccataatataagcatctcatttatatcatatattgaatttatagtatacgatattgcactaactaaaaaaatgagactgtaaaatagtttgtgtaaggatgaatatttccttaattttatttccctgaatattagaaaaaggaatccttttcccgtatgattgatttgaacgaaaaacatactagaaaagagattccttcatgaatgattttaccaaaaatatgacacaagctctattcaatcaagacaaaataaacgatttattgcgtaaagaactccaacaagcagttaatgatctattagaagctgaattaaccgcatttttaggttatgatccttatgatagagctggttggaataccggtaattctcgcaatggtgcttatttccgtaaagttgatacacaatttggcgagattgaaattcaggtgcctagggaccgcaacggcatgtttcatcagcacacgctgcctgactacaagcagcactcggatatcttggaaagcatgattatcaagctttactccaagggcgtgaccaccagggaaatagccgatctaattgaaaagatgtatggcagccattacagcccagctcaggtatcaaatatttccaagcagatgattccaaaggttgaggcttaccacaaacgcaagctaagcgacaagtttttctgcgtctatttggatgcgacataccttcctttgcgccgagaaacatttgagcgtgaagcagtctatattgccattggcatcaagcctaatgggcacaaggaggtcattgactactgcattgcgcctagcgagaacattgaagtctggacagatatgcttcaaaacatgaaatcccgaggcttaaagcaagttgagctttttctttctgatggtgttgttggcatgaaaacagccttggccaggacttatcctaaagctcattttcaacgctgtttggttcatgtcatgcgcaatatctgcgctaaagtacgcgtcgacgatcgtgaaaagatcatgaacgaattcaaacaggtgcatcaacagacaaacaaagaagaagccacagctgtcctgcatgacttctataccaaatggggcaaggtttacagccatgttatcagaagcttgaaagacatagaaccagatctgctggtcttttataactatcccaagcagatcagagcttcaatttattcgactaacatgattgaatcatttaacaatgtgatcaagcgcaaagctaagcctaaagcagagtttccaaatgaacagtcgcttgatacttttattggcattcaagcaatgagctacaacgaacgctatttcaatcgaatccacaaaggctttggtcaggttcaggataccttagaatcctactttgattaaataaaagattaaaaaatcaatctacgagaaaaatctatttacacaaaagatttgacagtttcaaaaaaataaggcaccagattatatattgttgcttatatattaagcataagtaacatatatactaattataaacacgcaaaaaacagccagctctaaatacaataactttaaagctggctgttttaacataaaattattttttagcggttttacgaagaaacttaactaatctatgtgtgtcttgatcacttaatctacctatataattaacattagtatcttttttagataccgaataacgtctataagtatcaatccacgaatgttttttcaaacctgtagtttcatattcttttatttcgaaataatgctttttaattttttcggatttattcttaaactttgtcgttatgtcaaagaaaaagaacttatcctcattttcttgtaatatgaatattggtcgtcttttaccacctgaaatctgaacgaagcgaacatatactgtagcaatatttttactcatcttttgacatccattcttgcagtttctcagggctatccaggtcttctgttgcccaatcttttgttaagttttgaatttctaattcatctttctctctttcagttaaattggttgaaaatggtaacccattctcagcaataagacgcttatagaacattgtgatagcaatagtaggtgttaaacctaatttttttagaacagcattgccttcttctaccacaccatcatcaatttgtacttgaattctctttttagtaattgaagccatagtagtgcacccctcatatcatttatactgatattatactactaaatcaatggaatcaacctatataagagtaatatttagaaaattatttactcaccacttgttcaataaattactaactgctttgcaatcctcatatcaaattttgcatttttgatattttttaacgatccaattcctgttcacctttttgaatagcaatttcttttgctttttcattggtcagcgaactgtttactgtagcaacatgtggcttgctagtttgcacttctttatcatcaagcaatttagacttttcttgatttttttcaatttcattttgtaaattgtcggttaacttgctatagttgccatctgctgtccagcactgcgttttattaaatgcatcatccaaatttctaactgtatctattgtcatacttttttcgatttttcttagtgccgtcaattcggtcttaaaattagttccattagtctcattgtcagtaacttcttgctccattttttctttttgcacataccattgcgagtgttcatgagtatctaagaagttttccttgacaatttgacccaatttttcttgttctttttcgagtaacttatcggtactattagttagtgtcttagtagctgaaccaacatgcgtcaaaatttgcccttttaccccacttggtaactcattaaacttttgtccgttgcttgtccaattagctatataatcaactgtctcttgcttaacatcaattccataatgagaacaataaagataacttgtaagctccgcttgcatctcttttaattctctaggcaggcccttttcttgtttttggctattatgtagctgtgcatgtcccaattcatgagcaagcactgatacattctccgttggagtgttgtatccatttaacacaatttcgttagtagccctgttaaagtatcccttagcattttgcggatccttatatttatcccgaatatctgcattaaatgggtcataagtaatgactggcattttcatgtcattagctacacttcttaatccattctctaaggagtcaatctgtcctggattcttcatattaaaatcttggtgtctattagggtaaagttctgggtatttttcctttggcatattggtttgtggagcatcgaatacagtgccaatcttataaaaagttttttggtaagtttctatattacccgcctcaattttttgtttttcgtctttagtggcagtctttaagttagctaattctttgttgccatccttatttttacgatagaaaactgtagctttagtaggaacaaatattttaattcctttttcacctctgttgaccttatagcccatgcttttaaactttgcaaatgatcccaccgcagtcgcacctgggcgctgcatctgaatcatcattgcatttcttgaggaatagttatgaaacttatccataaaatcaagcatttctacaactttctctggtgattgagtataattatctacttctttaagtagtccattttttaaatcctcaacggtttgagtatgtttctttttccaagctttacggtcaaaagtctttctaggtcgtctttcagactttaaagcatttttatccatatccattttatctttaacttgacctgatactaattctggttttgatttttgaaggcgatcaagatattatgactgaagtgaaatatcatcattaagactcgatatctctttatcagttaatggtgctgcccaatcagaagtaaaactagatttattccaatctacatcggctaaagttccactttctttttcactatcaataactttttgagttaggggcttaataccatttcgattaatcgtgtgccattgataatttccttcagcgcttggtgaaaaaagataatgatactctacatctgaattaaggtacttaccgtcattctttgatatatcgttaatcatcgcagataagtcatgatactgttttctaacaggatcatcgattctttgtccattagaattatattcatccataagtttagtagcagctgtaggattttctggaatatggttatcgttatagttccctgtttcaattaactttttggcatcgtctaaagtacgataattatctagtaaattttgtcctgtgaaagtaagtccaccatccatatgaaaatactgagtagtaactgaaccatttggatttaaaattgatacatttgatcgtgttgacataatttttcctttctaagaaaacaaaaaagacgcttcataatgaagtgtcctgactacatacaagttatttagtttttactactatcaccttctttctagtaattttaaatttacacgtttctgctgaagataatttactgtcttagctgagaataaaaaacgctgaagttttgataattcaatgatttcagcgttttttataccatctatttagaaactgtcaaatcttttgtgtaaatagatttttctcgtagattgattttttaatcttttatttaatcaaagtaggattctaaggtatcctgaacctgaccaaagcctttgtggattcgattgaaatagcgttcgttgtagctcattgcttgaatgccaataaaagtatcaagcgactgttcatttggaaactctgctttaggcttagctttgcgcttgatcacattgttaaatgattcaatcatgttagtcgaataaattgaagctctgatctgcttgggatagttataaaagaccagcagatctggttctatgtctttcaagcttctgataacatggctgtaaaccttgccccatttggtatagaagtcatgcaggacagctgtggcttcttctttgtttgtctgttgatgcacctgtttgaattcgttcatgatcttttcacgatcgtcgacgcgtactttagcgcagatattgcgcatgacatgaaccaaacagcgttgaaaatgagctttaggataagtcctggccaaggctgttttcatgccaacaacaccatcagaaagaaaaagctcaacttgctttaagcctcgggatttcatgttttgaagcatatctgtccagacttcaatgttctcgctaggcgcaatgcagtagtcaatgacctccttgtgcccattaggcttgatgccaatggcaatatagactgcttcacgctcaaatgtttctcggcgcaaaggaaggtatgtcgcatccaaatagacgcagaaaaacttgtcgcttagcttgcgtttgtggtaagcctcaacctttggaatcatctgcttggaaatatttgatacctgagctggactgtaatggctgccatacatcttttcaattagatcggctatttccctggtggtcacgcccttggagtaaagcttgataatcatgctttccaagatatccgagtgctgcttgtagtcaggcagcgtgtgctgatgaaacatgccgttgcggtccctaggcacctgaatttcaatctcgccaaattgtgtatcaactttacggaaataagcaccattgcgagaattaccggtattccaaccagctctatcataaggatcataacctaaaaatgcggttaattcagcttctaatagatcattaactgcttgttggagttctttacgcaataaatcgtttattttgtcttgattgaatagagcttgtgtcatatttttggtaaaatcattcatgaaggaatctcttttctagtatgtttttcgttcaaatcaatcatacgggaaaaggattcctttttctaatattcagggaaataaaattaaggaaatattcatccttacacaaactattttacagtctctctatttaagccttggtgcgattctttaatgttacctatctaattcttgattttggtagaatgatttaattcttttagtttttaggtcattaatgtcaatatctttttgcgaaatttcgttgctcaaatgatacgcaacttcgttcttgctaggtaaagtttctatcattcggtccaaagctttgtcttcttgttctctagtatctgcacgataaaatctcatgaggctaatcataaattcagcgtggtctatgttgtcaaaaggaagggttaaataatctctggtttcccaggtatctcgagcagagtttgcggcaattagcgctgttcttttatttccgtcctggaatggttgaagcttggataagcttgcaaatactctccacgcatctttagtagtctgtttagacgagttgtattgttcaattatttcatctaagtcttcggggtagacgttttctggagcaaagtatgcacctttagctgtgcctttagggtctgtgataatgacaattgcgtcgtctggattataacttgcatgtcttaagcgccctggaatacttgggtcttcttcttcgctatgggtaaaggctttattaatttcaataattccttgtcttgtaaatccgaatttctttgctgcagctatgccatctaaagcatcttttaagatggcaccatcgtggtgttgatgtacaagcttagataggtcattaagatctaaggctctttttgtttgcaacacagtactactgtagtcattcatactaccaaaagagactatgaagtttgcaaggtctaggttttcaatcatttgttctcacttactttccgtttagttagattacttacaattttagcactatttaattaataatccttgtttttggagcggcacatacgcaagcggtatgtgcttcttttttacattaaattagcagttagtttttgattagctgctctttcttattatttatctttctaatctttgatctcttcttcgcataatatgatatccatgaggtatatatttaacctgcttattcaaagtttgttctaatctcttcactttttttctcctttacactacaataaatttaattgaagaagcaattttcaaattaaggttttgaattttcaattcaggtggctcgctgccttgtcgtatggcaaaagagagcgtagtgcattgcttttcaaaaagtccttcgatgtttggagggacttttcttttacactttttcttattgaatatgtgttaaaaaaagtttaagaatagcagtagaaattaaggatcattacttgatcatgttgcccactgccttgacgatatgctagtcagaatgtctattattcattaatttatcctttcatgttacaatgtaggtaaagatcacagtgcaaattaaagagttgtatttacaacttggctgcctactaccttagcgatatgctagcttaaagaaggcgaggaatagatcagtgagactcattaaagagcggcatatacggaaagcggtatgtgcttctttttttgcattaaattagcagctagtcactgactaactgctttttctatatgcttatctttctaatccttggtctcttctcaaataagccgatcgcttttcaaattcttgtcctggtaatgttctggttgtatgcttagatttttgttttccttgttgcattttccgaaaagcttttaaggtgtcattccaatctttacctaatttttcactaggtttacagtatttaactttaggaaatttagattgaatatctttaacaaatctttttccagcttcatcattatctacacctaaacctacacttttaagaattcgaccttctttttgtaattgtgctgctgtttgtgttatatacgagtcaaacacttcttttttaaggccatccattgaaacaaacctagtatttttcattccaccctttacttttaccttagacaagtcaaagaaactaattgcatcaattggtgattcaaaaaatctaatattttctggagtttttccattcatacctggtgaatcgaatgaaaaaccatatcccttggtagaatttttttcaatcattttgagggttcctcttctaccatatttttgatgattaatttttgtaccttgttttgatactcctttaacttgtcgtctatcttgaggatcaagccacaaaaaaagtgcgttacccaatttatcttgtgcaagcactttgtctctatgtaattgatctatagtttgactcgaaattccacgttgattgtgcaagtatccccatactcgattaattttattttctgaatctatttgatttttatcaaacttgaaggattctttttggacctgataaactttgccatcacctactccactagttaacaccttatccattgcctttaggaatttctctttttcatttaaattgctacctgacaattcatacaatgtagaaaagcttaatgcaccttttccatgaacttgtcttgaattccagtaaaaagaatttttggatggtgtaattaccaatgaatcatgttctacccctttaaattcatcgctgcctgtttgacgtaaatcaattcctgcactccttgcatattcaacaatactcgctgaattagctgccttaatttgtttctttgtaaaagtaagcatttatttttctcctattctttaacgtcaaaaaagcaagtagtaaaactacttgctaatttccccacctatacccgactaactatatagtcacaaattaagatgattctattctaattctcgttcaacttcattttgcaatttctcaaattcacgtaagttcttcttggtttcaatatccgcatttgtcttttcaaatactttttcttggttagatttaatttttcgtatttgactttgactgataaaaggcttttttaagtaaatatgtccttttagattttttctacgcttaataatatgtgaatgaagtgtatagtcgtcatttgattttatcttattattttgtattgttgtatccttacgaatttctttcaatgcggattgaatatattcgtttggatcaactttatctttaaaattaatcctatgtctttgattatggttagcttgcttatcaatttttcttaaatcagctagcaatgcgttaccatttcttgcataaattccttctttgccatatagttggttaattgcataattcttattttcacgtttacttttaccatataagtcttgtcggtcatcttgcattttccaaactaagtctttatatttttgaaaatcggagttatattttagcaattcatcaaccaaatgatccgacatctttttttgatttttatctaacttgttgtaaaaccattctcttcttgactcaggcaatgctctaacaaattgatttatctctgcttgaaaagttggctgttcaacttgactagtcaaattaacctgaattgcttctctaatagcttgacgtctctgagataattctttagtcatctctgaagaaccaatcaactcattagcaaaaccacttttcatatgatcaattattttttgtggtcgcctacccttaggttgactaatcccttcacggtttataatttttcttcttgggtctttctcaactgttgcaatgtgaatatgaacattatcagtatttctatgaatggaagccacccagtacatctcatttaatggtggatccatttccttttgaaaaatactctgcatttttttagttgccttttgtagttcttcctcatttaatattccagttgtactagataaaatccccttcttttttaaaaaactattatcaaaactaacaacatcttgccacaagacagaattattctcttgtccttcatttaattgctcacgaatataatctaaatctttcaactgaacaatatctttgtcagagctaaatactccatctaaaactttttctttggttggatgaatttcactcagcttacttgcagcttgccctattctttccaattcagtttgttctttggtatttagtcccgtttcgttctttttctgatttaatgcatcaattcgtaccatatacccaagatacttatcaaattccttatcattcaaatcaaaaaaatttctcttttccattaacttttcagcagctgcttctcgttcagaatgttcttcactttttactctagtaaagttgttttcctgatttaattttcttacttgttttttaactcgacttaattcatctttttcttctgcagttaaaaattctttttcttctaatgcttcttttctggctatatatccaacgtaacgtccaaaagcttttcgtgaactcggcacagaaaattttgaagttaaaattatagctggtcgtcccaaaaattacctcctacaaataaaaattctatgaagcaagttgattaattattttgctctttcaattttaaaagccgtagaatcgcaatctcagcatcaaaacttactcaagttgtccgccattttcctccattctattattaattctttcttttacttttctctttgcagatttataaacttctgcatcaattccatttccgacaatttgcattccttgagtcatcaaaaactcacttaccatttctgttagaattgcaacttgttctttggtaaatcgctgttgttttctaatatcacttaaatcttttgtccacttagaatttttttcattttcttctgctaacttcataagatgatgaattacttcagcattattttttaaatcgtgttcctctttataatcttgaatccaatctaaatctgtatcagaaattgtcgctctaaaagttgtcttaatcattttttctagtcctcttaatcagcgtaagtttcttgtctttttttcaaagcattatcaatcttttgattaattttttgtaactcttccagttctttttctttttgaacacctaacatggcattgaagaataagaacttataaagttgaccattattatcaaagcaatgttcttttctaatctgcctaatttctttccattgcttatcgttgagtcgaaattgcaaaaagtgctgtcgtcccatttcttgccctctttctaaatttaatcatcttcttttgccgtgtcttctgacaaactatctaacaaatttaatgctcgttcggtgtcattaacatctccactaatgaaatactttgcaagaacattcagccctaataaattttcctgcagaagtttattctgcttctgaatcaataaactagtttgcgaatcttcattttgattttgaaaattaattggaatttgttcaatttgttctctcaaaaattgatttctggaaattttcttacttgaattttgatttaattgattaacaatccgatcaattctagccaatttttgttcgctgattccacggattaaaacttttaccataatttttctttcctctgatttctagtttctagttttccttctagtttctactctgaaatttgactaaaatctgcttcttttatttatctctagtaaagagcataagggaaatctgaccccacgccttttatcaaggtgtgctgggcttggttgtaccaagcgatttcgcatttttagaagtgatatcacttctgattaatttgacgtctatatacttctaaattgttcgtcttttacctgacattacgtcttgatacgtaatgttttttagtaatatccgaacaggacgtattcttacgtagctcattacgtccaagacgtaacattttttagctaaattttgcacctaattatcaaaatcaccgtccttaatgtctctgattgtgtcttcatatttagaaattgcttgctgactttgtgtgatagctgctttgttttctgaaatatcattttccaaactactaatttgtgtttggtaattttctttttgactatcaccaactttttctaactttgcctttgcagaatctaaattattttgagaattttgaatcgtagcttgagcatccttaattgtattttgttcttgactaatcttctttttattccaattaatcagatattgacgataatcaaggatatagttttgatagctcttagttactttgcttgaagtcagatcaaccttattctctttaatgaagaactcaatataattattttcagagaaatcttgcatgttaactcgcttattaactttttgtggtagaatatcaatctttaaatctccaaagccatttttgattccgctaacctcaattactaaaaagtgattattgattttctgtgatttgatcgcaagctcttctccatcttctccgccacgtgacatgtttactactcttatagcatactttaagttgcttaagtctgaatcgtcactagtagatgttacgtctgtagagtccccaagataatactctagcaacatcttttcgctttgcttattgtaaatagaatttgctaggtaaaatgatgaattgcctgtcactacattaacagtttgctcagtgtcaattgattttcctgtccaatagggactagcaacgattgcaataaaaattgcagccaccactccaatgaatgataaataaattttgcgatacttatgtttttggtgtcgcttcaattcatttttgtttttgctttgaatcattttttgcctttctaattgtcatccgaatgtacacgatagtttttgctatcatttaattcctgttttaattcagtaatctgctcctgttgatctcgaatttgtctttgactttctgaatctggattatcacgattaaagtaaactgttgccattagttgtgctgctgataacaaaaacaaaactaaggcaactaatttcaaacgatgatttgatttttttagtttagttttttctgattgatatacaattcgactagacatttttaatcacctcttatgacctgatctatcttttctatgttagttcccgtatatttttctacttgttttccatactttaaatggataaaagttggtaccttagttaacttatactccgtaatatagtgtcggttttgtggttgattagtatttacaaactgtatattctttctaaataaatcttttttcattacagcgtatgaaaaaatagaacgacagcttttgcagtcatctcgataaaataaaactgttgagtcatcattagttttgattttaacgatgtttttttgatttagttcatgattaacatgttgattaaaaccaataactcctatgaacaacaaaaaaatcattgcacaactaactgcaatgatttttaccttagtttcttttttcggttgcatcttaatctgcctcacgatcaatttgatagcgaccaaaatacttaattgaagtaatttgattagtcgctgtatcataaatcagctggtaagcatcagttggtgttcccaaagttctatcatcttttgtcatttcaaaataaactttggcatatacaggcacttggttattttctaaaatacctgtcttcaaatctagttcatcaatctgacctgttatatctgccccactatattggagctctaattgcttatcatttttaaacatagaattgttctttaagactttttcacttactaaatgtgtatctttcaccttgtctggtatttttaatttttcatcaccactatcatacgtgtaaagcagttttagcagtttacttacctgtttcttggcttttgtctgtgctacatcctgctcagctagtttctctttgctgcctccttccttcatagcaatatgcttttgcgaatttccaattttagcatctacattttttaactcatcttgctttttagccaactcagttcttgcctgatcaacatgatagtcgatagctttttgcttgttagtctcataattgattacgcctaattcgagcatgatttcgaggattgctccacctaaaagatattttttattcatcttagttcctctctatgttgatttctttaaagctatttattctttgggtcttaagattataatcaaagtcccaaccataagtaacttcttttttattggcactttcgactagggttactactgtaatcttagtatgacttacatctgttaagtcaccaaagtaaaccgttgtactcttgtttcttaaataaccataagaatctccattatttttgatgaagtttttgccctctttacctggaaaaatttttgtccaagcactaaattcttctttttgtttagctgacgaaaattttcttttagtatagatagctggtatcacttttagaaacttgtcacgtgcctcttcttctgcactcaccacatcaaacttttgtttatatgcagaattctttgtttgactattttgctcttgaactatttgcttctcaacagttttaatttctgccctaatatcattcagttcatcatttttaggaactctggcaattgcaaacattcccagaacagcgaataatactccagctgtcatcatccatactttcagattggactctcgctcctttttctgctgcttcatctttatccttctttcttggcattaataccaggtatgtttcatccagaatttttgtgcattacgccatgaaccatatctgccttttacatatttatttgctacccttgtttgattcttatgactgtaatcaccattaagcaatgtcattaagttaagacattgacaaattatcgacttggacttttaagatcattcatttgcgatttatcgcatttgaatgctcttttttcatgccaaataaacccaaatcttgtttagaaattaggctacacgatataaataatatacagctgatttgggtttgagatttcttttgtcttttcgtcctggtctgatcggaattgtgtaatgactaatttgaataagaatctttttaaagatttcagttgaagaagaaattatatacatagcctggatgacaaaacatgactgtttgaaattgatcgcatattgatacttgcattttttttgtggtacatatgcttgagcatcaatttgactgactgcgttaaacataatcatgtgggcatagatctccatttcaataaatctatcctgcttggaatgaaactgtacgctacctaaagcatatttcaactttttgaatgaagtttcaatgccccagcgcaaatggtagatttctttgatcctttttaagggataatcggctctatttagattagttagaacaacttcccattcttctttgcctgatttaggatcattaattctaaatttacaggcacgaaattttattgtacataactctccaaagtcccagctgccatctttggtatttttagaccgatattttatatattgacggtaatgatggttaaccaaatgaacgttttctgtagccttatgggtttcataataataattagaggtagtcacccagcaagctatatccttatcacactcttgattaggcaactcagctacttccttaaatgcgccatatcccgttttagtacgtatgacataataacagttaggcaggcgattacaattttcaatcatgttaaagccggtataacctcgatccatagtaactatatatggtccgcaatttagctttttaagcatttgaacggcggctttacgttcatccatctttgacttaggctgaaagatgcagtcttgataagtattatttaacaggtcatagagtgcattaacatgaatttggcaatatggctttcctttatgattgagatttccaacgatattctctgatttaggattccagatttgattaaaatcagacccatcaatggcaaatatacgatatttatgatcaaataactggatattaaataaattctgattaaatacagttagaatatgcttaaaacatgcgggtgaaagctgacctttgcgttggacataagcggaagtactgactactttatcgttatttttaatagctttttggccaaaagctctaaacaactcactggtcaaatcttttccttgcatattaatagtagttttaatgactgtagctgcatctaaaaaccgcttcctagtgaaggcatgaggatcatcgataaaatcatgaatatgctttccagtatcattgataatttgatcaagacgatctaaaatatttctgtgaagggctttcataattaacaccagctttctggcaataattttgaaggtttaataatttaatcagagggcgaaaaggtaggttcttttcgcctttattttatgcaaaaaaagaaccaaatcataatgattcggttctacagagattagattcaatttgtcaatgtcttaacttaatgacattgcaccattaagatattctctctttaattgataacgtccataaacacttgggttagctgggttaactgcgtcccatctacctccagattctctctgaacaatccagtcacgtgcttcagattcagtttttgataagccatcatcttcttcagattctgcatcattgttcaaaccatctttaattaatttaattgggtctttccaagtaccatcatctttgtacgcagagagctctgcggtagcaaaatcttttttagttgcaccaatgtgaacgtgagtaataccatgtgcattacttgctaagtgacctattttatctcctactgaaactttgtcgcctacctctaccttgacgtatttcaaatctgcttcatcaaagccgaattcctgataaatgacattccaaccgtcggagccttctacccaaacgtacattcctagaccatcttgagtatgtccttgaaatgcaattttcttaacggttccaccatgaattgccaaaatatcttgtccaccatatggaacagtaccaaagtcaacaccatcatgaaagccacctgttcttgtagatgacttaccaaataattgctcacctgagattgtattacctggtccttttttaggaattgacttgaatggccacccccatttgccgcttattggcttacaatcttcctcagctgaattatctgagccactagacccatcacctttagctagtgatttattgcctttcaaggcatcatattttttagcttgagcttccatacctgcttggtaatcactttcagctgcggtatagtatcctgcttttttcattgcatgagcatattgagcaactgtagcatcttttcctaatccagcttttttaaaaccattctgaaccgtcacagcccactcggtcgcaaaatcacttaagttcttgtagtgaacgtaattaccaccttcactaccacggctttcacctttggtaccgatagtgcttccttctgaataagtcataccaccaaagttatgatcatgtttagcaactgaactatcaccattacctgtttcctgtcccatttgagcaaaaagtaatctagcactaatcccagttttctcatgcacagcatccgctatatgcatcatagcggtctgtccatacttaggtgattcaatgacactaattcgtccttctactactcctccttgttctcctcctgtatcacattcatcatctgtagcagctcccattgctgcaattaaaattacaataaaatatataactgataaaacagctaaaattcctaataaaaaagcggctaatccagcccatctttttgtctgtcttaaccgcttaatacctgttatcattattgaccacctgcaaaaatttcaagttgtcgttcagatggtttcatcttgacttgatatctttctcttcctcccatcgtgacaattgcttgtcctgtttgcaagtcaggaatgttactgtaatctgaactatttaatgcttcgcctaatagacttttgattttcttaagttgagatggatccatactcattagccatttgtattggcaaagttcaaaaaccacttttaaacttgatagttgagcagattctaccgaatcgggaaccattttctctggtgattgtgtagcaaatataatacctgcattaaactttctcatttctcgttcgaagtttttaacataatcaaccgcaaaaatattttcataatttatgatgttatgacattcatccaggaacacatcaaaatactgtacatcttgacgtgtgattttccctgcctttaacagagcattctgttttctaccatttatcaatgcatgactccaaattaaacttagagccatatacaattgtgcctgataaacattttgattcattgttgaaatagcagaagaatcaaatagtagaagcttagtatctgtcaaatctctcattgtagaataaccatcaaataattgaccgtaattctcaatcattgattccaatgctaccttgattttttcataagttcttattctttcagcagtaaattgatgttgttgatagtacattggcgtagccaatttttttagccaatttaaaaactgactaaaagtcgggtatttttcactatctaaattagtaatttttatatttcctttattttgttgaaaatttctaggtaataatcccatgtctacataaaatccacgtaacaatgaatcaaattcttgcatttcaatatttacaaaggatcccttattaatcatttggaatagaatatctaccttagaaatatgttggtaaaaacttgctagctcatcaaccttacctgtattttcatctacagtagttgccattacttcaagtggattaatcataccttctgatccatccaagctaaccacggttccaccataatgcttaattaaaggaatatattccttagtcttatcaattccgcgaaagtacatatttctagcaattgtaccttcaaccaacatcttcattaaagttgatttaccagcacccatcttacccaagatcatcatattaaacgatcttctgatattagttgatctaaattgatcaaaataaaaggctcccccagttgaagtacgacctaaccagactcctctagggtcctttaagctttgagctgaaaatgggtcaccagctccaaccgttaaggctggaattggttgttctggcaatgctgctaaatccttttcttgctctgtgattggtaatgccattgatttaaactgtttatcttgcataaacatataaacagcaacgttataaccctcgcctcgaagcttgccacgaagattagaaactgattgatctaatgcttcaatcgttggagcatatacaaagattctggttagcattaatttgggaatttcgccaccttgacttaattccaatgcatatttttccaatgattgcatatctttttgtgcatttaaagcatcagtggcttttgtagcattaacttgtcgatcagctaattcttcaattgatctattcaattgccgcttaatttcatagcccgaagcagttttaacgtcaattgtagttaatgttgaatcgtttaatgacacttgagtaagccagagcaaaagcggatcattaggataatggattacagataaacaagcagcatatccatcacttgcaattgcataattatccgcaaaagtaataccgccctgcggttgtacttctgctagaaacttagtattgtaaccattttttagtaattctctttgctttttcaagctggtaacttgtcttggatttagctttacagttacctttttcttcttgtgtctctttgttttcaataaactagaaattctcattttttctcccttacttactattcaagttgttttctctaaagagtactttaaccgtttcttcatagtccaatggtctcaagcccattaacccttgatcagcaaattgagcggttctagtgttaactctaatatcgtgcaaatcttctccaaaaatcataatgtaaaactgcacatcagagtaatcttctgtatttcttgacagcattactgattgcaacaacatttcattaactaatcgtaaacgcattttttcatatctggttttgggtgaacgaatcccattctttaaatggcgaaaatactgttgttgttcactagtatcaattctcgtcgacatgactacaattttataatcgttgctataaatccgattaaatgtagtaaatgaatctaggtatttacttctggtttcatcatcaagtgaatataaatctgtcgaatgtacacgcaaatagcgtgcttgggtgccatctactaaatcaagtatcccgtcttttgagcagttactatagcccaagtattcaactattgattgatctcttgcatcttgtctcgatcctttatctaagccaaaagctctaaacaagctaggagctttgctcctactgtttctactttttctttttgttcgcattattttctccttctaaaaataatggataatatctgctttggtcttgtcgcataatgcttaacaaaacacgataatttctaatctttggcgctagaggggttcgcattaccagcagaattcctactacaactccaaaacctgtcattactaattgccaagtcggttgtaaattaaatagaaaagaaatttgttgtcctgccatacccccaatgaaaagagcaaaaacatcaaacatatctaggaaaaagatttggatagatacattagttgacttaggaatcattattttttgatatttatccatgcactaatcctttcttctgctatctccatgacctaatttgccaatgttggtagaacttggtgatttagtttcagtagagttttcaacttgctgattgattgtggtcttatcatgcttaatttcagtcaccgtgttagtattgccttgagtttcaacggttctattagtgtttgaaggtacgctgctcttcatagcatcattcacactactcattccttgattgcctacatcatgagtagatacttcagttctgccagcctttctttcaatatctacatggttggtaccagcagtttcagttactttactatgactgtcttgtcccttaaagtctgaaacattgcttaagtgtctaccgccttcaccaactggttttggcggtgtggtttgttgatttgaacgttgttgacttgccaactcactagtggatttttgagtatctctcaagcttggtaattcatcgaccgcattactacttgttggtgagcttgaagagctatttgcttcaccacgcttggaacctgaaccagtaacagaagcactgttagttctaggatcatttgctgtttcttttttaccagtctttgaaccattagttgcttcactaactgtggtatttggaatttttgcatcattaccaattgtcttagctccacctgttgacttaatagagccgtcagttgaactttccttagcagcatttgatttaggcttgctatcatcggtcttaatgccttggttttgaatattatcaggtttaactgatgtattcttaccttggtcatttacatttttagctgaatcaacattgcttgttgcaactgtttctttcttgccatcatagtttggatttcctacaaatgaagtatcacgtccaatacctgttggttctgcactgccaccattcttttcagctctgttttgcatgtatggattatgatgtaaagtgttgtactgattatcagttaaaccaccatttctcatcattctagcggcttcatcttgtacagtttcagatacagcgccagaatttactgccctgttccaatcaactgcactgccaccattctgcttaaagtcgttatgagctgaacgaaaggctcttcttgcataactgccagcttgttttgcttcactattgcttgctccattttctttagcaatagccttagtagagctaccagcttgccaagcttgagcttcaccaatcgctgcccctgctaacttaccagaacctctggcaactccaacagcgccttcagctaaatttttacctttaccagcaatatattcagttgctgcaattcctccagcaactttactccaaccttgcttaagtccagtatccaaaccaaagaatttttgcaccttgcttgaaccttcccaaagtgcccaagttaaagcaatcattccaactgcatataaataaggattatcatgaatctttcctgcatctgatgaactcatccacacggctacaattctatagaacgctaattcaaagccttggaatgcaattaacaacgctgaactaaaaatatcttgtaccgcagctttagtacgctttccagtttccaaatcagtggagaaaataatgattgataatacttgcataattgccaattccacgaatgctcttactgaaacaaagcaaactagtaagaaggcaactgtcattgaaagtaaggcaactacaactgggaaaaattgtactgaatatcgttcatatccaccgttaaaaattttgaaaaaggcagtattgctttgacttactttggttgcataatatcctgaatatgcttttccctttacatttgatttcgtaccaacgcctgtaggagctaatttataacgcaaattgtcaggatcccatgctggtttttccttagacttatttgctttattacttaatttctcagctaaatcagctgaaatagtagttgataaatcgcctgatgttgcagtatcaaaatcagacttgttcatagcaaatgaaccatagtgaacatctttttgtctctggtctttaatttcaccatttttatctttagaaacaccttcccatttggtattagtatccccattattgattttgaagccactaaaattattagctatgattgctaataggtcattagaattggcttgtactacctgatatggcaagcttgacgtccctttatcattatcagcctgtacaaagcctttatatacacctgtagactgatcaaccacccaatttgtaattggctgaatatttccgattaagaacgctgaaattgctaattgccaaacgacattttttaattgaggagctttacttgaggtaccaattttaattccgatccaagttaaggttaaaatcatcaaccctgcagcaattcccattaccccattaattaaattagtgtttaaacctgtggattttaagattcctgagaaatccaaactatctgttgctagttcacttgcccaattggcaaatccataaaagatcttaactataccccattttgtctgattcaaaatacgtcccaaaaaatcatcataatgtaaataaggtgccgcattttgtagagcttcagttactttttgtaatttggctggatcataatcacctgaattggttgatttttgccaccaatctaccaaactactaaaaatatcaagatactcaggattgatgaaactagttaaatagaataaccaatttgtcattaatttttcctttctttaaacaaaaagataagtagtcattatcgctacttatcttgataatattcattaaagctttggctaaattcctgtgttaactcattcttttccttgttcttatcttctaattttttatctttatagatgatattaacaaaagctattgaacttggtttttgtccttcaggcacatcttttaattttgtagcctcgttcaatattgcttgttttgttccatcactaatatcaccatcatgttccgttaaccagttcgtgataaatggtggaatctgattttcttcttcctttaaagacttcttcatttcttgttcttccttagcatctttagcagctgcttgaacatttgcgtcactttgacgatattggttatatgcctgcaaagccaaattttcttcttctacaaatacatttccatcttcatcttgtttggtaacttgttcagtccaagttaaccatttgctccaatcgatttctaatgcttttaaattaatattggcatgtgcatcaatcttttcaactaaatctggattagttttaggattaaagtcatcagttaagaatgtatgtgcaaacggcattaatgtttttcctgtgttaaaaataggatgtgaaactaccgcccagccccatttattcattcttgttaaaggtctcaaaactagtctttcaccgccagctaaatgttctaatcgttctggtagtatcaacggcactttatctacgctaacactaacatttttggctaaaccattttgatctttagaaatattgcttgtctcaatcgttttattgccacaagcttctgaaaattctttgttagtagctgaatcagtagacataatcaaacatttattctgacaattttctttaataacttgtccgtcttctttgccatacttactgtagagctgggcataagactggataactaaagtaaatagaatattacgacctgctgaaactgtcataatccgatccatattctgcagcggaatcatactaccaaactcatcaaaaatacattgtactcgtctaattgtacttccaccttgaaccagccgacactgacgtgataattctgtatataattgattaacaaaaattgtagctagcaagttgtttgaagcatctgaatctggaattttcataaagactgcaattggcttatcactataatgcatcttaaagttttccatcttaatttcaggttttcctacctgacttacttcaacctttttaactttaggattaatctttaacttaaaagtattcttcaaacgcttatgtcctgtaatagcttcaatttcaacaaagcttcctgtttttagattgacatcaaagttgttttcaacaaatcctttttgactaacacgaatctcattcgttttcagttttttattatgattatctctaaaattgattttaattaactcaccatatagtcgttgatcaagcaactgaaactccaaatattttggaaaaccaattgatttcatttctagtgtgttcatactggtcatgcgtgagtttttcggtaaagtgaaaatatctagtttctgtacaacagttgaaaaaattgagcctcttgccttatcatctgagaaatttgtggaaccgaattcttttttagcaatagatccctgttccaaatgcttaaagtattcacttaaaacgttgtgttgagtatatggatctgatggattagtataatctatctgtcctaactgattaactaaatcagcgatatttacaaaagtaatatattctggatgggcttttttatctctaaagtttttaggattcatgcaatactcaatcaaagcaataatcataccaaattaagatactataatcataggtcatcatagacagtaagcacgcattttttatttgttgaatcatcataaatcaaaaatagtaataagcttttttccgtaaattttccgcaaattacgtaaaaacagaaatgggaagaaccaactcggttcctccctttttctgtattcgcaatgaatagtcgtgcagtaatataaatatattataccacaagaaaaaaagccccacgaaattaaccgtggagcaaacatcaatataaatcaaaaggttccaaatttgatgttatctcagaagagatgttaaaaattatatcatgagtaaaataaaaaagccaccctgggatttctcccaaggtggctttcttgatagatttagaggagtatttcacccctcttcttttatatttcaataggcaatttgattataacacttttctaggatcttttttaccagtagcatgttccataccctcagtggtaacaacccattgctttccaaacttacgcactgttccttctggaaacttttgaggtgactgactaatggtctttctaacatagctctctgatacgccccagattcttgctgcttcttttgcttccataatatctggactatttaagttaatcactagaatgcacttcctatcattttaattagtaatcctaatagaatagcaactacactccaagctaaataacgatgcattttttgtttgtgtgtcatggtataattagatatgtcaaagagaggagcctctcggattccctctttaaagcttacttgtgtttgacaagtgttagaactattcgccctagttgtttgataagttcgtaggctggatagctccaagctccgatcatcgcatacttagcgatcttttcggaagtctcatcacgagtgggctttttctttttgccttttttctttgacatatctttacctcctttcacttattataatatcacgatatcgggataaatgcaataaaaaaataaaattaactaaaatatatttattttgaacataaaaaaagctcttgtgacagcagatcagcaagagccaagcaccgactagacggctagacacatgcccaaagtaaccagctttggggctttaaacgaaagtgtatcctttcatgtccaccactattatatattaaaaatgaacattgttccaatattttgttctcattttaaaatttgctaaaatatatatggctgtgtggaaccccaccaattccaaattatcacagtctagaaagtgttactttcatgtccataacagcttttatggctactactttttcaagtattttagccactgtaattgcttcatggattattaaaaagttcatgaagtaaaaccaggagagcaagcggataataccactactctttttattataccataacacaaaaaagagccgctccaggaaaaatctcccagagcggctcttgcggcattttgagtgttcttcacactcctttttatatttcaatcattattactatagcacgatgtaggcacgattgcctgtgacgtagacggtcttgccattgtgcttttctttgatacgtaggaatctgccgacacgcccttgaatctcaacttttgagttaagttccaagccgtagactttcccagcgtctgcctttggtgcatctaaggcgtgagtatgtggcatcacgatcttggcaacgccatgtttggcatcgttgtatgcgatcgggttagtcttgacatagacggcacgaccatcgaagtattggttcttgccaactttgacggcaccgttttccaagccgaacacctgccacattgatccttgtggttttagcttgtcgctttctcgcttatcaagtttggagcttgtgtaaacgtatgctccctttgaattggatactactgcgacagcaccgatattccactttacaacgggatgcagagacagcgattctccggtcttgtttgttgatttaggcttagaactacctgaatttgcctttaaatcgatcaagcagatattgccgtcaacgttataccccttatagttatcggtaaattgccagattgctacgccgtccattgatgggaagtaattaaagtcagcggaatcttgacgacccatgactttatatgaagctacccataaacaagttccgaatgactttacaattcgagctgtgttgagacggttacgcaatacataagcaccagcatatactagcggcttatatcctgcttctttgatcacttgcatagctgctatgacagcatcagtgtttgaaccaacagcgccgttgacgtcgttgccactgccctgctcccagtcgtccgcaagatacgaaccaagagggatgccgtaggccttcgccttttcaacagcgtacttagcttctgcccgtgcttttaatacagagccagagtgtgtagcataaaagtagccgccagttaaaagcccgtgagcaagtgagctcttgatctgtccttttgcctttgggttgaggtaacctgtaccctgcgtaagcttgaccagtgcgaacttagcacctgtgtagcttacattttctgattggtagctggcgacatcaacacccaaacttctttttgatacggttaagtttgacatctttttcaccgcctttcatttggtttcttttggcaatcttttggttttcaaacgattttccaaaagattcaaaaacaaattcgttgtaagtcttatatctaatcttttgcatcagaatcatcaccacttacaaagccaattggctgggcgttgtcatccttgtcttgtgtagccttttcggaatcagcctgcatttggtcataggcgtgttggacagctccctttgctacggattcggtaaggggcttgttttccttttgtgcttggttcagtaaagcttcaaccgccttagctttcttttcagcacctgaaatgtcgagcgtagcggcttcacttactacgaacttggcaatctggtcaatggtcataacttcctttggtaaaggcttctttgacttagacgcaaagaaatcaataccagtagaaacaccttgacatacagcgacaaaggcaagaaatcccacaaaaagatattcattaagttggcttaaattcattagtcagtcaccttcttagttaaaaaagaagtagtatctggcttattttctacttgtggtgctggtgtagtgctttcaggatccttgaccattgaatcgtctttgattcctgcaaagtagcgaacccacttggtaacctctgccttgatgtcttgtggtgcatcgtcaacggttaaaacaccgtcttgcaccaaggtaacgtaatctaaaattctagtgtttggcttcattttcacttaactcctttctgagtttttcattttcattgagtagttttttgttttccgcgtttaagcgcttattctgttcaacaatgtaatctcggttattctccacgctatccatatcactttttttaccgttttgcttaaaggtaaagtagcctaaaagcaaagcggacaaagccgatataatgctgtttaggtcgacatgcactatatcacccctaacgctttgaataatgccttgctgtccagataataaaggctataaccgccgtatttgacaaagcgttctggacaaactccatttcatgggcaaaaatcacgtgttcaatttcgattgatgaaattattgctagcagcaccacgacaagtgccaacaacacccctagaagcttattgttgttgtaccgtgaacaggtgtaaaccagcaacgcaatgcctacaatcatcattgaacaatctaagtaaacgttgttcatcatccacgctagttgtggtggataaaagaaaaatctgcggttaaggtaaaagcccaaacctttaccgaaaatcagcagactaatgatcacataaagtgaattattgttgaggcgttgcagtagttggcgcataagcttcgcctacaatcttttggtaattttcagctgataagaaaccttgcactactaggtccttcatgccgttcttatcatagatgccgaattcccagtccatacgatacatttctaaaaagtttgcttgaatttgttccattaaagtcatgatttatgtcctccttaactattgcttatcggttgcttggtctgctggcttggtgtcagttgccggtgtagcgttattagcatttgcgccaactgccttggttaccattgctaaggtcttttgcatagcaccaagaatttgattagtgttttgagtttgttcagtaaagctcttcatcaaagctaagttttgcttagatgattgagcttgaacttcttgcatatctcttaatgcttggtctaccttatcgttggctttgtcgagttcagcactcttcttgtccaattcagccagcttttgtgtagtttcttgcaagataacggcttgattgttcttgtcgttctcgctccaatcagtggcgcccactgtccaaactgggtctttaaagctgtcagatggtctttcagcgtggacttgccatgggagcgccacacttgcttcatcgccaaaaactgggattactttgtgatgccaaacaggatccgcattgtcaggatctgacaagtagacgaagcctgtaagagttgggaactttgcctttaaagcctgttcttgttcagcaacgctgttttgatcttgtgtagcgtttgtttctgcgcccgctactggtgcaacttgtgtattttcgtcagccattttattggctcctttctatataaaaagcccacgggaacgccccgtgagcaaggttttttgcataaaaaaggcactcattgagtgctaatctacgtttatttctatttttacccaatcaaccgttattggagtttcatgcataccgtgatcatcatcttcataagctccatggtaataagcttctatgccgggacctgttccataagctgtggtttcgctgcccacttgcaaataattgccttgcgttgttggattaaaaaacgttgatggctcgtctacatgattatatagaacgtagttcttagcccggtaactatcgccattgctaaaagtcaccacagtgtatctgttcatatctaaaacatcaacgctatcaactaacttgaatcgatgatcaggattatttagtgtcttagtaatgctggtgtagccgtatttacggtacttttcactattaaagagtatgctttcgatcatagaaccaccacctttctagtgatggctctaagtgcttgataaaagtgaattaagagggatttacccccctcccaattttcagatgcaatttggtcgtctttgatgaacgccattcgtccttcgtaattcacgacgtagtaagttccaaatctattagcaattttggcataacattcacaattcggggttccgataacgttgcccaagcctaagtcactggcaagcgctcctgttccattcaatttcacgctagttggataagctccccatttcttaccgtttgctgtgatctgctgagaattgttgtcaatgttgaaccattttaatctattaaaaagcatatgatctagcatgttctcgctcccttctattatttttcaatcattgcaataccgttagggtttgcgttttcccaagcttgggcttgtgcttcttggttcgctgggaatcgcttgcctagcaagtagttgttcttgataaagttgacggtattgatcaaatcgttaatttgtttctgttgttgatcaacggtatcttgattagcgtacttgtgccaagtccattgtcttgaagcacttgcattagttgcacgccagaatacgtcaccgtcagcactccgatattcttgtgtaaccgagttatcatcccagtggtaggtagtaagccagccccacatagtcgcagtatttgctaagggaccattatttcccttgacgttagcaactttaattgttcgcgtttcatgcaggtagttgttaaagtcaattgtggtgtcatggatgtagctgttgttatagtcaacagtgtattgggcaagcttgttatacaagtcttggacagttggactgttgatttgtccattcgccaaaatagcggctttttcttgtcctgcggcgtttctgaaactgaaatggttagaatcatcgttgcctaacttgaaaacgaggtctaagttgtcattaccgttgttttccgcaaagatttgagcctgatcagtagccccagcccagctaaggccaccaatgttaccgtcatgcgattcaactgtgcccgcgccattccagttgatagtgctatgttccgccatgtctccaccggagttggacagcttgccatttaactgtcctttagtccagttaacgatgtcttgccctgcattctgatccagcaagatctgattgccgccggccaagttttcaaccgtcatcttagttgtggcgtttgcgttgacatcgaaacctctggcaacggttgtggtaacgtctacgttaccgttgttgtccggctttaccccgctaaccgatttaaccgccgcttgactagccttgcttacgtcgtcttttgtcgcatagacgtcctgcaactgcgcaatttgactataaattaagttgcgaatgtcgttatcgtttaattgtgagggattcaagcaactccaattcatccaggtagctgtttgatcgattttgcatctgacatagattggtgtggcagattggatgcctacaataagttggataacattgtttccatctgccaaaacttttatgacagagcggtttttaatcggcgcttgcaccggattattttttactgcccgagcttcggggactgtaaggttggtcatgcggtaagcgccggcttgaaccaaatcatttaaatcagtgacttcttttggaaaatccttaatgcggtcgctgtcaacaatcaagtcaagaatgccgtctttgtcaggttcaacaaccgctccgtcattgatctttgcacccttgaccttgccagcctccgcaattttaggatcatactccgctttgagcttcaaaatagccgcgttgacgtctgacatatgagccacgccaatttcgttaaccgtcagatcaacctttgcggcgtttgaaatagcaaaggctaatgaaatatcgagtgaagccgttgatctatgatctggcgaccccgctggaatagttcgttcgcctaaagctggcgtaattcctaacagaatctctttctggtcgtcattattctgtgcaaaccaaccaatcgaattgtaagtgaggtcatcggttagatctttattactaaaagagacgctaacagtaactgaattatttataggaggtgtaacagttggagcaacctccattttttgatcatctagcgttgtcaaatttctaatggcttcatcatccatgcttgtaacgctttgaccaaataaggcaaccctggtgtatcgaatttcaccaaatcccgcgccaactgttagtaagagatgacgtccagcattggtgacaatcgtatctttgaatttatcagatttgtcatctttaggctgagtattatcctttttgttgtcgtccatttttccttcctttctactaaatcgaatttagttctaaattttcatggatcagcattttagtagcgatgtaaatgccggttggggtattttctttttcgccgctccaccaactagaagcaaggctggtggtacatctatcggttgccagcaaatcagtgccaaaataccaatggttatagctttctactttttcgcctttccaccaactagaagcaagatcgttgatttcatgcttcctatcctgtgtggcggcaccgatgtaccaagtttgcttctcctcataaagaaatttgatttcatcaatccagtaacccattgctagcaggttttgaatattctttatgatgaatttttccatttgaacattgggcaaattttcaaacggaatcacaataccaatatgtcttaaacccgttttatagactttaaattgttctggctttgcatttaaagcagttcccagaatcttaaccattgaaggaatcgtaccttgtgccctagaaattaaaatatgtaaaaaaataatgaaacgaaaagtttcatcatcactaattctataagctttgtaatcttgcccgattaggtcaagcgttgtaccttttgctttgtcaatgcttcgccagtctgcaattttttcattttcatcgctgattttttcaagcagtgaattataactgtccagtagctggtaaaaaacggtatcttttttcttgttccagtgatcggctacctctgcaattagttggtctgttgtctcataagccaattaaatcaacctccacattttcggggtcacaatgggcaaattcggaacgaccaattaaaatattttggtccgctaatttatcttttgtgctgccaattacaattgttgcatcatcaacaccattaacgtcataggtaacggaataaagacgggtaaaattgaccctttgccccatttcaagggaattaatttcgtcgcaaatagcttgcttgatgtcatcaacccccgcatcactgttccagtcgtcattaattgatacatcgacctttacataaatgttgtgttgctgtgcatgatcaaatttaacttcttttaattttcccgtagcgtccggagcttctttaacaattgaacccgctaaagtgataccagccgcgcatttatcaattaaggttttagcaatttcatcatcgttcccgcccaaaacataaatatggactgaacattcagggttgccatattcatccgtcttatactggtcattatcaatgaatcccacttgcttaacaccattgagattcattaatgctgatttaatacctggctctgtggggccgggacgggcaacattttccatgattaatcgttttctaaacgtttcatcgtcttcgtaatcttgcccaccgcctgcgggtcgcgggttggttacagagataaagtcttcatctgggttggcaaacaaagtaattgtgttggctggtacattagtaaattcaccagtttcttcacattcaacatttccagttccttgaaaagccccgtcgctttgttttgaagtgataacgtcttctgttaagtcaaataccaagccgtcttctgtttcgaacttttcgccagcttgaattaaatattcgccttcagtcgttattactacttccgcatgagatggagcgtcaactttacgggtcaaactgatattgcccgctaatcggtctaatgctgaatttacagcggttgaatagaatccagaatagtaaatttgttcctgttgctgaattaaatcataagacgcatcactcattaaacgggcaaaaattcctagataagcattacttgttagtgcaatatcatcccctaatctagttcggtaatcgtcttcaacaccgtctaagatttccgcaaaacttggggcaatataaccggtttcttttaaaccaaaatcagttgtcaacttgtaacccccccttctacttcaccaatatttgcggtggctctaaaattaatctgcatttttctttcaggcttcttgataaattcgatattatcaacggtttcaacttccggaacatttgcttcaatagccgctcgcatatcattctccgccgcttgtttattgaagtttttacctaaaaagctgctatagtctgcccccatttcggggtctagccgttgcatttcaccgtatcgaatttctagcgttgctttaattctttgtgctatttcgtcaagaccactggtcatttctaaatcgtgggtaatcgggtcaatgactagatcatgattatcactcataaataaatctctagccatcgtcgtcacccttataaacagaaacgataattgagtcgtttgcatcatgcattctgctggtatttggcgtaaaggtattccccgtgccgtcccagttatcaatgtcacggtccatagtaacggctatcactacggcgccaactctcatagatttctttttcggataatgttctaaaaaatgtgagttaacttccgggctactatcaacggcttttaaatccgacttaaacttatctaacaattcatcaagcctatagcaagattcggcaaccggaacatctaagtactgagccgatttagtgccatcgatccaattcgccagcggttgaatatctgcaatgtgttttttcttgtcgtaagttaaaactttagctaaaaaagcagattcaagacttctgctgaatcggtttttcaccttactaatgttttcataccatcgaattggaaccctatttttttgtttcatactgtcatctccttattttttagacttaccttttttcttgcctttacttttagattttgttttatgaccagccttagcttttgtaaccgccgcaatggtgcattgagtttgtggactttcgccatcaaaactatgctgtccattcttaacgacaaatttaccctttaaaaacttagaattcatgatgataccagtattaacggtaatttctgggactaaaggcgtaacaatttgccaagttaccccgttcttatcgtcatcgttttgcgatgggacttgaattaagtctttatcatcaatcacaaaccatgtatttttcttgctgttaggattaacgattacgagcttgccacgttcgtaaaacatttcggacttagccagcttaacaaagtttttaatcaaagttagcggtttgcctttagcggtgaaggatttttttattccttcattttttgccaaatcaattttggctattttgataccggcttgttccgctatcccctcgattacttgcttataagtcgtgccttttcggtaaactcggttagcaaaataagtcttattatcacggcttttaacccttttatttgtagtttttggtttaacccatacttttcgataagcccaatggtggactatatgtttctgcccttttttaggacctctcttgtaagtttcaacgaccgaggtactataacgctgattcttgtaatgacctttttcagtgattttaacggttttgtagtgattaacctttttattcttttttagctttagctttcgagcagctacattgctgtagtttgtgccttcagtaaaagttaaaactttactatcagttgtcccatcattgcttaatttacccgtattagagataaatccttcagctatttttttagggtctttaccccagttaaaatttatccagcagtgcatcccttttttataaaagtctttatgttgcttggttaaattgaaaatagttgttgtaaaagtagacgggacaggatcattagtaaacgggacttcaaacgtaaaaggataattatgttcgtaagtttcatcgttatatacgatttgcttgtgtcctttactatcaaccgccacaaattccatatgtggatctttagtaacgatcattagtaagacacttcctcatccgttaggtcgtcatcattttcgttagggtcataacctagcggtttaattgatgggtcttctgtttctgatccattcgggtcaacaacgtcaagatacaagcggacctcatatccaaatgttcccttgccttggtctgttgccttacccgtttcgtccatcgtgcgaatgtcaattcttggcaattcgggatcagggatatcaataccaactaattgaccaagcaaaagaggctcctgcgttagaagcctcttattgttatgccaaattgtaattgtgtagtaatccgcaacttcgttgtaatctactctcatatcataggtatcgcccacaagggttatttgaaagatataaggaatatttttaacatcaacatcaagataatttctcatctaaatcaccgcctacgcaacccgtattttattgccagggtagattaagttaggattcttaatgtggttgactcgtgccatccattgaacagaactgccgtatttcttagacaaagcccacaaggtatcgccagatttaatagtgatagcagtgtactttttatttcgattacctgcgacagatttagaagccttagacgactttctgtggtgcttactatcatttgaagtggtgatttttgcttgatagacaaattgaaaagtaagtgaaacttcaatgttatctcgaagattcttatagtcgttgttcatatttgcgattaagtaatgcttatagcagaagtcccctcgataggttaaccgaacatgcgaactattccattgactaagcatgtgccatttacggtatgaatcggctttatctttgccaacaatgatgcctgcaactgttgcgcctttactatttacacgagcatatgagctatatggtgcgccctcatcaaccggataagaagtaatgtttgaagaaacattttcactttcaccgtctgccggcgaaatataaataatttcacctttgccatccgaacggtaaatagcacatttaccttcattcttccagccggtgttgtgttccgcaatttccgccaatttgttacttaaatcgattctttgcgtaacaatacggtcgtacttgtctttcgcttttttataattgttttccgcttgctttttccttttgtttgcagcatcaacaagcttcaaacaattatcacgttttcggataagctttttctttttaatttgattcttttcaaaatgtgaatcgaagtcatagccctgcgcctttgaaaacatttttcggtaaacggcgctttcatgtttttgccgcttgtcccagtatttcatagagtcatgggctttttgttcagctgttctcttttttggcttagttgcttgaaccactaacatcaccttcatttctataagaaatcatcatcgtcacccgtatcatcgccaatatgatcaagaatgatatttaatttttgacgtacttgttgatctacctcagcgccaatcatttttgctaatttttgcaatttagcattgtcaccatcaacgtcaccgttaatattcacggttacttgaatgtcacctaaagccccgccagttcctcttactgggcgtactttcggcttagatgaagttagtggctttaatctttgccgcgtcttttcatttgagtagatgtgaaccggatctttgaattcagctaattctggcccatgttcgccaactagaaccttattgccaacgacaggatcgccgcctttagcatatccaagaactttgcggatctccatggcacctttgacgtgctgagcattgtagccgccacgttcccattcagacgaaaacttgtttgctaggctggcaacgctaccagttccttccaaaacggagcgaagaatagcactgtctgagccttcgcctttaacggcaaagcttaattgtgtgccggcgtttttccagcttgtaccgtgacgtctagcataagcgattaagttagacttacgaccgccaagccattgacctaaaccggaagcaccaccgctgctgttaactgcaccagggtttaaaccacctgactcaaaattccaattacccagaacagccgcaataccgttcttggttgctttaggatcaagcttctttaatccgccggctagggctttagccctttcggctaagtcgccgccgatactaaatgaaccaagtgagccaagatcatcgctaagattctttttaatccaactcaaggcggtactgcctagctctttctttgcaagagccattaagttcttatcagccgctgctgtcttcttagattgagcggcattatgcaagccacgaacacggtaatatccgtatcccatgcctttgtcatcagcaattgaggtaacgcgtgcatggggtggcgtttcgttgaacattgttccggtgtgtgggttcttaataattcccacgtgaccagcggcacctgttccatggccaaagataaccaagtcgcctggaattgttttagataatgacttacccaagtactcaacacctgaactgtgttgcattgccacggtggtacgtccaatatctacgccaaagtgacgtaaagcttgcattaccatacccgaacagtcagatagtgtcttgcttgccgcacccatttggtacttaacgccactgaatgttgattcagcatattttaaaaactgctcacgagtaccacccttgccagtggagtcaccaatcgcattgttgatgacaatccacatagcagtactccaaggattaccaaagtgagttgacgcattcttgccaagatcgaccgttcctttttgcagaactggtccgctttccttgatgttcttggtgaacatatctgcaaagctcttagcaggatcagcaagcgcatgtgatgcaatctttcttaattggctatgacttacgccactacctttggcaaagtgctgaatgccacgttttctagcgacttcttgcgtctgagtgccgttcaagacaccccagccacgaggaatcatcaaatgaacgttgtcaccatgagggaagtacaattcgttgcttggtgagacaagagcctcttgacgtggaccgctagtcgcatcattgacaactgaaagagtattttgcgtcaagcgaccgttagcgtcagacccttgtgcaaagtgaaccgtcttgatgacgctaccgttaccgccaaattgactcaataccttgtcgatgcctttaataccacggttaagttgatcaatggtgtcacccattgcgtccttagcgtatgagcgcatcttgcccatagccttgccaaaacctttgctagttgagttagcagtagaaataacaccatcgtgcatgttattcatctgcttatccacagatttacgcatgcctgtgtattccttagtagcattagctctgtttttgctgttgtacttagcagtttgactgttaatctttgaccagcttgaagcattgttcttgcttaaactcttcaaagacttagtagcgtcatcagtgatcttcttgtaatccttggatactgtcttggtggtttgaccaagcttagtgttaccagtggcataacctttgagagttaagccacgacctaaaccaccagccatgactttgcgagtgtctcttgcattaagaatgtgttcacctggacgcaccttagtgatggcaggaccattagcacctaaaagacgtgcgtttgatccggctctgtaggctaattcaggaccggcttcaccaactaaggctctatgagctgatccgattaagccaccagttgcatgagatttgatcttctcatacttgaaggctttaccagaaccaccagccgcacggtttaagtcattaccaaaacctttcaggttattagtgatacctttacggatatcgccagctttaccccagaaattgttccaagcatcttttattgtattgccgactttgccagcccaatctttgactgctttataggctttacctaattgacctggaattgaagaaacaaaagaaccaactgcctttttgcctttattccaaccgctttggatactgttgccaaccttgccagaccagttgcttacactcttgtgtgctctgtttaactgaccaggaatgccaccgacaaacttctttacgccagtgacacctttgttccaagtcttttgaatattgcgaccggtacgactatcccaatttgctacactcttggcacctttagctaggttacctggaatgcctttgacaaagttaacagtagctttcttgccacgttgccatgcccttgagatattcttgcctgtttgactagcccatttgccaacactcttcttggttttatctaagtttttaggtaaatctttgaagaacttgtggctagcctcgacagcacgattccaacctttatggatgttgcctggtaggtcttttacccacttaacggctcctttgaagccattttggatagtcttgccaacgctattagcccattttctgaatttagggttgttcttgtataaaagtgcaggaataccagcccacggagcaatagcagttaaggctaattgcttgccattctttttgacgaatgaaccagccttgccaagtgctctgcccatagacttaccaacttgaccaccccatctaccaatcttactgaatgtgtctttagtagaccagccaaggttttcaagcgaccagaaattctttggtggctttttgcgttgccagccatgtacaaagctgttaacagcactaccaccaattcgaccaaagagtttaccagcttgtgcgccaagtgcagcaccaataggaccaccgaaaatgccaccaatgatggcaccagcacctgtaccgacagcgccaccaatgtctactgatctcttagctgcattgtgtcgatctttgtaagcttggaagccttgatagccaacatctaatgcagttccgacaccaacagcaccgccaagcaatcgtctgccaactagtgctttacctgttagctcaccaggctggactctgccgagcttgaacatgccaccgaatgaattacctttcagtgcattgattaagccaccctggcgagatgatcctttgatgtattgacctgtaaccgggtctcgtggacgtacaccggtctctttgccaaacagtagtctacctataccagcgccaattcctttaccgttaccgataccgaaattagcttttaagaaaccactggctaacttggacgcacccaatgtgccaagaatacctgttatataagcagcagcagtcttaactggctttggcatacctcgcatagcttcaagtagcttgttagcatagccaagagccttgctgataccaggtgcgacttcctttgcaaagctcatacccatatcagtagcaagttgcttagttctagctaactggttctgcaatgaggacatgttctttcttgacagccttgaaatatagccagtacgtgcagcattttgagattctcggacattgtgttgcatgtcaccgtagtgattcatcaaaatctgagcatcattgaaacctgtttgaccaaataaagtttgcaggtcggatgatactcgattagatttcttaccacgagacgcacgattcagcatctcaaagatggttcctaactgtttcaagtgaccatttctggtgtacaagctattaggattaatacccaaatcatgcaaggcacctagcatcgcagtactatgtggcgctttgatcaatctagtgatgatctgacgcataccagtaccagcactcgaaccttcttcgccgtagttagataacgtacccaatgcacccagcatagtatcgatagtttgaccatttgaatgagcggcactacccatcatcttgaaggactcgccaaaaccactttcaccaccaacgtcaccggaagttaagtcagcaacgtaagcggctttgttcaaaacatctcttgtgtacttagacatacgtcttacactattaccagctctggacttatagccaaactgttccagcataggtgcagctgagttaacgattgagttgtaatcttcgttagtagcacgagcggcttgcaaaaagtacttgtgagcagctaagtcttgttgaccggaataaccacgtctgagcagttgctcagagcctctagccaattcgttttgatcaacaccataacgaagagacaaacgccggttttcagcctgaatttcacgagtatttcttctagctgctctcggagaatcaccaccggtttcctgcaagttcttgataacgttgtattcatcagccaacttggttgcttcgccattggccttcatgaatgcagcggcaactggaaccatcgcagtagcaatagatgaaccgacttgaaccaatgctgatccagcacctttcaagcggtcccagccactctttaacttatttgatgaaccggtagtcttatcaaagctttctctagctctgtcagatgatcctctagcacgatcaaaaccgctacccatatcaccaagtgcttttgatgattcatgagcacggttcattgactgctttaattggtcagttgattcagtagctttcttagccttatcagcaataccagacagatcactttgcgcacgattgagattgttattagtgccaacttgcttataactattagctaacctgtcaatctgtgttttagtttcacctgatgcacgattaagcttgtctaagccattagcggcagaatctggcatcttggtacgtgacaacacccgattaagttgttctgcattagctttaactttatcaatacgtctatcaactgaatcgaatactgaattatcaactctaacgccgatatcaataccaacatgtcgtcctgccatctatctcatcctttcttgtgcaaaataagaaagccttattaggctttaactgtcctcaccgccaaatgccaacgcaatgccttttgccataattcgtgcttgatctttagcggttaaatatgtctgatatttcaagtcttttttgactacttcccacatcactcttaattggtcgagcgttgcatgattgatccatgattcgggaacaccgtgcattaccaaacactgtggtaaccacgttgcaggatcagaagccaaatcactaatcttcttcggtgtagccttccccattaatgcttgattgaaaccaatctaaaatcttgttgtaagcatcgtcatagcctccacgcttgtcaaaccaatcgagagagtaaatctttggacgtacaatcaattccttaatagcaacgttcttcatgaagtaggtttgatcaatggcaccaagagcagttcttgcgtcatcacgtaagcttgaagcttttgctacacctggaaaaattacttcgatagtgtattcattcttcttgcccttattgatagttaagaaagtaggcttaccagtaagtgaagcaatttcactagacttttcttgcttatcaatcaaagccatcatgtcttgcaagttcttactttcagtagccatttggctagccttatcttcgtttgattggttgttatttacgttttggttttgaatttcttcgctcatagtttttctcctttaatttttaatttctgttttgtaagcgtgaaagccattctcgatactaacgaccgactaaggattcagtatcaaggttaagtgcgtgaatttgccatgcacgattaccggcgttttgtgctgcggtgttgtctggcatctttgagatgtagcagtgtgtggcggtttggtgaactgttgaagttctcaaatcgagtggaaattctgcacgtgtgttagccaattcagtcaacttggcgttgcttggtgaagtttcgttcaagttgacagtcaatgtggcaccggttttgttgttgattgaggcaacagcggtgccttgtgggtcttgtgcgacagtaacattgtcgttgtcgtaggcaacggaaatcatggtatctgtcgcaaaaccatacatcaattcaccgtcaaccattaaagtggtgtcattggcgttgtattttgccatcaagccggtttcggctgagttaaaacttgccatgtgttactcctcctttaagcttttgaattagtgaaagtatcagattgaacagtgccgtgtacgagaacggtgtggatagcacctgaacggtggtatctgaaactcaaaccaccgtagtgacgagctgataagtctttttgactttgagctgaacgtggagtggcggttactgagtaatcccccttgccagttgattgagtttcaccggtgtttgagtcgtatacttcttgttccaaaacaattccttgttcgtaggcttgttggaggacttggctacaaatggcggcgagtgcattaatgcctcgttggtcatatggaaccttgtcggtgttttgcaagtacttttggatcttgtcgcccatattggtttttacccaaagatcgccgtggagtgagtcgatgtaatcaccagacaatacccagccttctgatgtttcgccttgtccgcttacttcgatgtaagcaatagcgtgaacacggtcgatagctgacttttcttgaacagtgatttggtcagcagtaatgcccttaagctttctgaacttccaggtaactaagccaactgtcaaggtggcggttgcaccgatgagagctgcatccattggttctgataagtcgtgaatcaagccgatggtgtagttttgtgcatagaatgttacgtatgcggctggttgagtagcttgcaatactaagaagtgatccttgttagcttcgcagatgttagatgcaataattgcgtcatcacttggggtggtgtctgtgaattgtgacttatcaaagatcatgaaggcccagttgtaataccagaatgccttcaaagcgtcagcaagcttgccctttggataattcaatacggcaatacggtcagatgctgcttcttgcatgaagtagttgtctgacttgatgtaaattggatcagtcttgtcgtagtaagcgccaactgcgtctgctgttgcgtattcaacgtattgagcaccggtataaggatcagtcttgcggcttaatacgccgttcaatacgtcgttgggttccaatttgtcaggtacaccagttactggcgcaactggtgtgatctttggtacattgatggtcttgctgccatcatcagtagccttgccatcagttgtgccagtagtcttgcctgtatcgctcttagctggcgtatccttgccggtgccagtatcagcaagagcaggctttggtgctgtagaagatgagcctgcgtcaacttcatgcaaaataagaagattgccaagcccgataattgcaggttgcttgacaacagtcatttctacgtcaacgtccttaactctcgtaaaaggacgaacgtctgtaatggtttctgccatttgctattgctccttttcttttccattggcgctgataacttcactgtcaccagcgtcgctgagttgtactgtattgatttctgtttccggctgagcttggaagtggaggtcatccggtgagtaaacatgaccgccattggacactaaaaaagaacaatcaaagccgaacctatagtcgtaataggtaccaactctgactgttctgtcgcttgtgttcgtaaaattctgtgggtcaatatccgcttgctcaaagtagttacgataaacactgctttgaaatgcactgtaaaggtcgtttgccatattcatcgcttgaatggcgctgtcagcatggcaatcaatttgtaggtgtgagatgtactgtcgtcccatgcccaaccaatcgcctgttgtttcctgttccggcacaataaacgaataagtgacaaaaggatattgtggacggtcagaaactaaattctgatagagcagatcgcaatcaatacgctctttaaccagttgctgaatgatataagtcagcagaagattatctttgagttgaatttccatgttggtgtgcgtcatctcccttcaattcgtaaatgatcaggtttgaatagtcctgatagttagaagagttagtgacttcaaataaaccaccctgtgatgggacattgaccattgtgtgaacgtagtacttcccagatgacagccacattaggtctgcattggtttgagtaccgccggttaaatattgaatgagttgtgatgtcaactgattaaccggaataaccggctcatgtcgtttctctgctgttttttcatcgattaaggtagattgatcgtcagacattaaaaaaccacccacaagctcttttttgcctgtgtgtggtttgtctgatttccgaacttcgatatcaacgccgtaatcgtccaacatcgaagctacatccatgtaaaaactcatagtgtcctcctatttcggaatgatcttataagtgattttgttaatgagtgccccaccttgaccgccagcatgtttaccgatcaatggattattgaaacctttgttatcgatagtcattggtgcgttgcctggcttatacagcctgcgcatctcatgctgaatgtcagcaacagcgacagcacctagcttgtcaagtaagccttttcctgtagcacgaccttcaaacactcgctggactccgacctgtgtcaatcgaatgtacttttgttcatattcaatcgaagtcttacgaagaaacggtcttgaaggaattttgacttctttcatcaaataaaagatgatcttgaagcctgtatcactgcttgcatctttgaccgctaggacatgagcacctttcttgccacctggtcggaacagttgctgatcaggatgtttttcgtcccattcactactgctcataggtaagccatcctcaccaagttcatcatttttacttggtatgattaaccagccatccggcttgtgtggcttgatatcagcgccatattccaatgcagatacaatttcgatcaatcgatcgttaccccaaaaaccaattacgaccatgtagcgatttaatatgtcgatttcgtgcttgattgcgtcccaatcgcttttatcatcagtgattttgatactcaatgttgcactactccatatcgattactgccaccgcagaataacttccataagcggtagtagtaaaggccccaaacgcttgaatggagccaatctttgccaattttggactcgtatttacgttccaagacggcaactttttcatccaaaataccctgaccagcagaagtatccatgctagccaagtgcagagccagatatttgatcgctgtaagcgtaatgtcattccatttaccgtcaactggctgagggaaaccatccgccaatgtgttaacggtcgcatcgtgaattagctctttgagagtgtcgtctgacatgctctgagttaatttaggtgctgcgttcttcaatgcagtgatcggtaccactggatcatcagtgttcatagttcccctcctttagctaattagcagttggtgtattgataccagtaatttgaacgaatgccgatgggtagcgaactgccaaaccaccatgacgttcaacataaggaatcttagtaacaccgtcgtggtattcctgttgtaattgagtcatttccattgcaactggaatttgtgcaatgtcctcgtcagttaagcagacaatagccatatctttttgcttgtcagcctttgaagcgttctttgcatgccagtattgaccttcaagttcaggaacagcttgaattgaactaaagtattgagaaaccatgtctctaacagtgatgtcaggacgaagctttgatactgggttatcaagcaagtcaatttcggcttgtggcatcaataaagttggctttgcgtttgcgtaaccaatcaagtgagtaatcttttggactgcttcacgtaagacattacgcatcttcaaggcaccgtcttctgtgtcttgtgccaacttatcaagtgcgtggtcaccatcaagagctaattgttggaagccggtcacatctgtattagtgtcagtcaagccaataattttagtgttaggaccaatatccataccgttgaaaatgatacggtcacgacgttcagcaagaccacgagcaacaagagcagcttgatcagcaagcaagttgacgttagctgcttgtgcttcttgaagttccatccatgagtactcacaagctaatgctgattgagtaattggaacttcatattccttgaaaccttcgtcaactactggaatgtcagtgccacggtttgcgtaggcttgtgccattgccttagttgaacgaaccttgtatctgtaagacatttggattgggtatactttgatagtgctaaataattgcaaagcaactagtggagcagtctttggatcgtaaatagtttgatcgatataggttaattgttccttagttgcaactcccatttgagccattaactcattacctcctaatttttcttggtttcagatgctggggttggcgtttcaggtggttgaattgcgtgtgcatcgtccttggttgggtcagcgccaccggtagtgccaccaaaacgagtgcggactaaaagacgtgcagttgagcctttatcagccgaacttaaaaaccgaccaactgcatcgtccgcagtggtcggtttaaatgaaccgtcagcatcaacagtggcaagttctccacggtcgacatcttcattaaccggaacattgatagttccatcagtaagaacaccgagaacttctcctggatgccatttatctttttcaatgtcgtcttcatagaagtggtcaacgtctaagtagccacgctttactgcaacgccgtagataggtgccttagtagctgtaactgcttgaccgttaactaaagaaacgccagcgccgaatggaatatcggcactagcgacttctgttaagacttcgtattgtctttcaactgtaccggcggatagatgaccgtcgtggtacatggttccatcaggaattgccattacttgttacctcccttattcttgtttgcaaggttgtagaagttttcatgcatttggttaactgaaacattactctcagcactgtcacccttgaagtcgtgaacagtagcaccaacgaagtgtgattgtttgcggttctttactgcattgaagtaagcattaacgtaaacgtcatccttgccatcaatttcagcggaatcaccatcaacgctcttgatagcttcaatcttcatttccttttctgacttgccgtgaggatcaaagctgtcgccaacgatagacttcacatcatcgatcaagcccatacgttgatcaaccaacttgtctaaaccgtcgccttcaaccttgtcacgataaccttgcaattctttttcaagactatcggctttggcttgtgcttctgacctgtcgttttcagcttgcttattgccgcttttcaaagaatcacgttcatcagttaatttcttgatttgtgcgttaagttcatcaattctcttttgatttgctgaattgtcagagtcaaacttgatcaacttatcagcatcatcggtagcgaccttgattgtttgatcgccaatgcgtaccttttcaaaatccatttgtggtttttgccctttctctttactaaaatcgtccagctcaccgatcatttcggcactatcgccgacaactgatctatcaagtgaaatgtctggaccttcccttgccacatcaacaacagcaacgtggttgatagtgatgtctttttgtactgagtcatattcagtattcttgtagacaccgctttgaggcacgacctgcgtttgaaagccaatactgagttgacgcttgccgttatcgaccttgttaatcaaatcagggttggtaatcgtcaaatcaactcgaactgttccgtctgcctcatctacatgggcattcgacgcagtaagacctttcatcaaagtattcgtgttgctcttatcaactaggattcgctgaccagcttcattttctggatgattgtcagtgattggcttgttgtttgcactcgccaccgtgctgtcagacaagatatcctctggcagtttggcttcatgacgaacagtgccatccggtttcaggtatttaaaaacgccagctcgtgcgataggcacgtttctggcgtgaatgtaacctgtaattggatcctttgttatagcgctgactgttgatgagtcgtacctcgtaatcattacttaccaagtggtacgttgatagcttgatcaggaatgtagatcacttgaccagccttaacaactgggttggtcttggataagccgttgaagtaacgtagttgttggtaggcaactaagacttcatttgcaacatcaagtaaggtttgaccttccttaactgtgtagtttttgcaatttgtgtaatcaaatccattctttgccactcgtttcacctccttttttggagttgattgagcgtttaacgcagttttttcgtgattaactgctacttctggcgcatcttttgtggtttttggtgcgtcaactgttactttctctgagttaataccgaaaagtggtttgttatctgtcatgtcttacctcctaataaaagctaaatatcggatcagccacacagcggcagttgattggttcgccaggcatctgtccatcatcaccgccagttggatcgtcgtaggtttgacgagtgccatctagttcttgatgtttgggccgtactcggttatcttccattgattgccagacgtaatcttttgcgcccgccgctttgtgtcgactctcattgaacttagcaagcgctgatccggtttgatcattagcaacaagtgcagcatgtctgactgacataccagtttgtttaacgatttcttttgtaattacaccggtgccgtcaccatttgagatagctcgtgagatgacaccagtgatgctgtctgcatatcgatccttcatgtacttgatcagttggacgttctcagcaactcgtgcgttaaatatcttggtcaattcagggctatcacgtattgggttgataccagctatccgaatctgcattgcaacgttgttgtagctaaacatatcaatcgttctaacaaactgttcagcaattttgcgaatagttgcatcactagtggcttgtttgatcgtgtagcccatagcatcgaggttatgtagtacattctgttgttctgtttcagtcggattgttctttttaggtgcatcaccaacaatttgagtaccgcctttgaagtagtcccccatatagacgttgaaatactccatagcgactttgcgccactgataaaccaatctaacgatgcgtcttcgataagcatcttcaagattgcgaggatagcgagtgtgaggcattcttctatgagtcgtcatgtttctcagctcgtttcttgtctttttgatagttatccacaatgttctttacagtttcagcatcaacactgtcacctgctgtctgcattgctgggttagggttggtgtcttgacctgctagcatgtcgtggacttcgtccggtgcaagaacgccgttagaaatcaaactactgtaagcattagcttggttcatgaagatttctgagtttgtcttatcgtccatggtttgtaagtcattgaatacgatcttccaatcaagttgatcagggtcatcaccgtttgcgtacatcaaaatacgagtgatctgttcaatttcaggctttaacaagttggtctgaattgccttgatgctgtcgtagtagttgatgacatcttgtgatgcaccagctaatgtcccagcttgttcaccagttagaacagattttggaataccacatgcagcactaagctgttgccatacgaagttgtaaagcaaatcaataccgccggttggtgttgctaccttttcaatactgtcttgactatgaccaaacgccattgcttctgtattaagtacttggctaatctcacgcttatcacgtttaaagtcagcgtctccttcttccatcaactgatcagacttgtaaaacttgaaagtaaattcacgtaacatcttcccagtcgattcaagtgcgatatccattgctttgagttgatcctgacatctggtcagaattgacgtacctgtttcatcatcaatcgacttatcaagtgcaatgtgccaataccggctttgatcaataactcttggagtgtttctcggagtatttggcgtttgagtaccgttaggatcgaccttgtaaccggcgttttgtgttctgagtacgattgcctgctccttaccatagttaagactgagtggatcatcgttagacaaaaccttgtcaacgtggttttgaccaaatgcatgaatgaagtgaactttttcaactgtggttggatcaagtggcttacttgaatcggcatcgtcattttcattaacaccaatagtgatataaccatcaccgccttcacgttgataaacgagttgctgagataaggcttgtgtagtcttcaaatcataatgaagccgttgatacatcttctgacgttctggatcgtcttctacaatcacccgaaaaccatttcgggtagcatcttcggctggtttatgaacgatacgtcttgcaatagcattgtgttttgtctcattgtgcagtgcatcgtagtcttgttcatcattaaccactcgccagcctagattgtcataactggtaaacggatcaaggtcgatgccgtcaccaacaatggttctctttttcggttctgattttcttctgctaaatagtcccatgtttcctcctttctaatatctgataactggtccacgactatggttgtcgtgaagtctcttaactgcgtaaaccatcgagtcaacgttgtcgtcgtgcattgcgttaggaaatgcaaagatttcttcaagccagtcctcgatttcaggtcgccactttggatgtggcacatagatgtttcctgattcccatactggactaactgatgctgctcttgcttccttgctatctgcaccaggtgaaacagcaacgattcctggtatctcgtgttgcaaggcatcaatgatagctggaccattggctcgatcttcgaccaactttgttgttgcgtctgggtaaaaccttgtcatagctctaatagcatctagcgtctcagtgaatgacaaacgcttgtgacaccagccaggtcgtagatataagtcagcgtcacttttgctccacacttgaccagcgacaaagtcatcgttggctttgctcttgaaagttgcgtcccatgcctgtactgatgtatccaagtgtttaggcaatatctttgcgtctttatcagttaagtgaagtcttacttgtgtttctttatcaggaacataaaacttcacccattcacgtttgaagatattaccgccttcaactgttggactttgttggtacaaagcagtgaacttttgagtccccatgtcgtgcttgttgccaagtagttcatcaaggctatgcaagtcaggacatagtgcctcgccattgtgtctgcctaatacgtctgtttcatcaggtccaagaccggtagcaatagcaggaagtttgatttcttcccatgggaagcttgaattatcaagtaagcgtcctgccaagtcgtcctgttgccatctggtcataattacgatgactgagccacctttttgaagtcttggcttgaatgttaataaccattcattccaaatcttgtctttaatcgtaggtgatccggcttcttctgcgttcttgattgggtcatcaataatcaacaagtcagcactcataccagtggcaccaccaaggattgaagttgcatagaaaccaccacgatgatcaacaatgttaaattgctgagccgtgttttttccaacttgcaaagcatgatcagcatctggtactctttgagaccataaagaaaaaagccgtctatttgattctgcaaactgactgtataagtcttgtgagtaagcagtaaccataacgtgcttttcgggatgcttcataaggtaatagcttggaaatgttttggtgatggtaagcgattttccgtgttgaggcggacatgaaattatataaaaatgttgctcaccatctgcgattttttgaagcagtgaacagatgtacttcgtatgtggatacattgtcatatctgggtaaacgagttcaaagtacttctgatatgaccgccaagccagttcatcttttagttcattgacagttagctttttaaactcatcgagtagtgctgtatctgtcacttgctatcaccgccttcaatagattgaatcatttcttcaagttgcttatcggacttcttggatattaacttacgcatacgaccggacttgtcttgtgattcattagtacgtgattcagccaaggtagcctctgcattgagtttacgaagttgagcctgtgtgattggatcatctgtaattggcattctctttagtaactcctttgcagcatcaatccgattcttccaatttggtggtatctcttcaacgccatcatcagtctctacagtgatttttaatgtcccacgcataactccacctaaaaactctaaaacctctttctgctttggaattttggcttcatcgatctgtttcatgcgcttgttgatataatcgttgacggggggtaatcggagggtacgttttgcctctgtattgatcgtttcaggtttcattcgatcagttacatacgctgatttataggcttctgtggcgttaccaatttcaatgaacttatcagcaaagtctttttgttttggtgtcaatcttggaatagtttttgacttctttttctttgcttttttcttcaaaactggtttcacctcctaaatcaggccaataaaaaagacactgaacttaatcagtgccgttgctgtctttcaagtcgtcaattctcatattaataatgaatgctaagccgtttagttgattagattgatcaatcaataattgcttttgagtgtgaccaatctttgcacattcagatgatcttagaaactcttgaatcttgattgatctttctgtatatccttcacgttctttgatcaacttgctaattaattctttgttttccatgatgttgtttccctctttttttatgtttgtgtttctttttgtgctcgacatctctttcaagttcagcaaggattttgttttcttccttacatgagacaagaccatattttttagtgcgatacattgctgattcctttcacacgaaaaaaagcactggggttaaccagcaccttaatacgtgatcctgaatgtgttcatacataatgtgttcttgattttaactaacagaaccacgaaatgagcagtaaaggaattgaacctaaactgtccgccattggtcaatttaattcgacagaggaaatctatattggaaaaactcgcaataatcgactcatcgacggacagacaacgagtctgcccagaatggtagcagtttgactactacctaatacaatttgagagattttttataatgatttattgattatcagttcaccaacatcactgctggctaagatctaatgaagtgccgaccttcagtgcatgcagagcaacatgatcaaggggccgccttttcaggcggttaggttaggaaaaccttgttatcagaacacggactcaatagtccttttttatatcaatgctccgctcgcttgcggtcatcgcagagctaagacgtgaggcaggtattctactgcgacacgtcgggaaacatgatttatcttgtcttcaagcatttgttgaatcttcgggttcaaattcaataaaaaacaacaagattgattcagcctcagtatttctgaggctatgacagcatctggattcgaaccaggtaacttgcaagccacatagtatgcaatgctgtcactctaatttacaaggagaatagatctaattggtaaaaatgaatttccgtcgcatcggtcgaggtagatctcctatctactttctcgacaataacaattatctgcttttttcatcatcgggcgatcccaacttaatcccgattaaatcccaagcaaatccttttcaaatcccggtatgatcccactttcatcccggttacatcccattttttcgttttcgcgtagtttgatctgctctccaaccagcgtctgctagagtttcaccaggataaatctgcaaatcaaaacgatcagcttcatcaggaaaatacttgtcttgtgccgagatccaacactcagcaaattgattcaatgcaacattcttgaaatcaccgaactgattatgattcatattacagtcacgattgatttcccatactttcttatgtaagacgtaaaattcaaatagtatctgaggagatacacctgatgtatgatcaatggcatatttgattgctttcaaaacatcaaatgctgccagccttctttccatcatcttttcttggctattaacgccatttgagtgagcgggagcaagtgatagctggggactagataaactaaccccactgagccgttccattctgttaatctggctgctgagaaaatcatctacattttctgctgttaaaacttcgtctggtaaatcaaataaaaacactgtcccactcctgtatctcttcaaactttaaaatctacatcacatcattatttattttgcttattgagtatttctcctaatttcttcccatcttcaaacgcttgatcagtactacctttataataaccggcattgtaattggcttcggcaatgtccttaaccaattgtgcaatgaccttggcttgttcaacggtggtaataacttttgcattctctagcattttatagccgtcttcgttgatgacatcataaccactctcagctaagactgactttaattgatcaattggtttcatttttatcctcactatgaatctctaagcgcaatttcaagcctgctgtacttacgtaatgatcagctttattgcctaacttccagaaatgaaggttcaaatcgtcttctaaacgatagatgtgaacgccatccgtgattgtttctcctacaccaagtactaacaactgataatctccttaatctaaacttttatcttcaaattcattgacgttaccaattgacttgcccttaacaacatttgctgagaacttaaccttgtcaccaggtctaattaagttggcaaaatcataatcattagtattcacagtgaaaatgatatttttgcccttcagcatgaacattgccttgttcttgttggaaacaactgcagctcgattaatcacgccagagaagtttttcttcttttcacctggtgtgttacctgccgaagagccagaatcaacaagagcctgtctaaatgaatccagagcacttgttggattgctaccagttccataaatgctttgatcgcttgcatctaagtagtaatagccacgaatagcatgagttgaatctaggatagtcattacccaagttggacgattatttacgttatagagaattggcatattagcacgccatttttgagctttgtagtcttgatcagcattatttttagcgccatcgctgtccataatgttgttagttctgtagaaagtgagcttgccagttcttgcattgatcatgctgtaacctaatgctgaatcagcaccggttctatcagtagtaaagtcagtgaagtaactaatcgaaccatctttgttgaagactgaagttacaccattttcaacgccatttccggtcggcttcatgatgccggtcttgctccagttccagaaaccatacttatatttaccaaaatcgttgttgatcttatcagcaatgccagtcgtgatgccttcgtcaatgaacttaggcatgttgtgcactgaataagtcttagttacaccggttcttgcatttaggacagccacatgtaatctgccgaagttaaccctatggctcattggttctgacttgtaaactgtttgaacccaataaggatcaccattgtcatcaatttcaagttgtggcgtatctaaactaagccaactaggattgtggcggtagatttgacgtgacgcatctttgttgaagtagccacttactgcgtagtaataaggtttcttaacaaatcttggtgttgcattttgtctagtagcatcaatgatgaaatagccaggaatctcaccagctctattgctttgaaaaaatccgttatattcaattggaatcacataaactggcttgcctttgtagtactgtgattgaatttcatcagaaatcgaataatattgcgtgtttggaatatcagacgatgcttttctaacacggttaataactgttttaggtgctaatgcaattggagtttcattgcgcttgaatgttggcgcttctgtgctttttgaatattctttagatatagaatcccatgttggcttaacagacatgtgtgagtgcaatgatccgcctatacaaactaagaacaaaatcactaagacggggatgcccaccattaaaaactttgaactagcatcgtcatcatcgtcataagcctgagaagctaacgttaaataaaatatcccataaaacgtattaccccagagaatactcagcagatttctcgacggtagcaagaagtaagtaataaccgctgctataatccagatcggcaaaattgaaataaatgcccaaattttatttgatgctgtggctaaaacaataagcatcatcactaatggcaaaattgtgtaaaagaaccaaattgatatcatttttcttccttccgtttacgtccatattttcgatttctaataattttaaataagtcacaggcaactgcaccaaacataagaaaagtcatcaccagtaagcccataaataagatgatcaaaagaattttaagtataattgcagccatctccattaataccactcctttttatcggtatctggatagccataaccgattaatccttcgtttacaatctttagcgcatcgtcaactgatctcgcaataccgtggattacttttctgtgcaccgacggtgagcagtgagttaatcactgctgtgtacttcataatgtcatttgatctcatttggatctgtcgttttcttttatctgcttgcattagtaatcctccatattttgcttcaagtaatcactcatgttcgaatacttgtgatcaaagtcgacaggcacaagagcatgatgtgctttcacatagtcaacaagtgcatccccgccagtcgccatcataaatcgtgactttcatgttcttcttcatcagggctaataaattcttcattattgttaacaaaattaaaagacctcatagcaagattcattaagaaatcagttctgtttttcttagcatcaatattttcaagaaaaggtatcaaaccattttcatctaaaagaactaaagctctattaatcaagtcaattgcaaccgcttattgatcttgtctagttagtttttgattatctatttctatttctttcatactagatacaagtgcagcagaagttaaatagtcaattaccatttgtctatcagttattttcatttttatgctcctcttgtaaagctcttcctgtaactgttcatatgctacttatcgcttttaatttccatcatgatcttcaaagttctagtaagatcatgatttctttctacaagccggtcatttgtctgctttatctgctattttcttcatcctcataaattactactgttactagctcgttattctcatctttaagggttactgcattaacaacatcatgaacttttatgaattcgttggggtcctcgccatcagaaatattaaattccttttgtttaaagtgtctgtttcttttttcttcatacatcactagtgcggaccaatcgcccttaccgtagtcgtccgaaaccacctccgtaaatttaatatcgatgatttttttaccttgaataaactcattaatctttttatccaaatcaggcaaaaaatgagaccagagtaatttaactttcataatcttcacccctcaatcattacttttttctttatctgtcatttctttaactccttttacttttaccagtcttctgttcccttttcttgcaaatggtggaaaaaccaaaacctattgcatgtgttacaaaggagcgtaatttcatcaattggctttaacttagcaccacaataagggcatttatagccatagaaatattctggtgtcctattttggaaaactggctcatcatgccaatactttgaatttttcatcttttagctcctaaaacggaatatctccgttgtttctaagcaactcggttaagccgataaacctagcatgcggcgcataggtagtgaaccatgctgtatgctcgtcaacttcccaaaatctgcattcgtacctcgtaagagaaaattcggattgcaaccagtacttttttccgtcaactagctggtcggctgacgtgattaattttctaagtctattcatttcttgtaatgcctctcaatcttgatttcatcattcagcattgttatcaagtagcctattgggttattcaccaagtatgctgaaacacgctgatcatatactttgctaagactttcaaagtcatcatcagataacatagaaacttttaatctgatttgtttaagttgtcttagtgtaggtctaagatgctgattgaatgtcttattgtaatttctgatagtgaaccataatttattcattcttgaatttatttttgtttcttcttcttctgatttgtctttagagttatccacagtttcattctgaggggagggtttcgatttattagaagaagaattaatattattacttgtagtattatctcttgtaatattctctttgacattttcgtcaatagggtcttgatctttttgacaataccctattgatctttttgtcaatacctccccttccacagaaacgtatatcctacgttgctggactgttttatctgcagctctaattatttctacttgaatatagcctttctttttaagatgacttatccaacgtgataccgtttctttactgacatcatagagtggagcaaagtaattgtttgaagccgtgcaataaccaaacttgttagataaggcagttatttcactataaagaagcttttcattaggtttaagatctttatcatatctaacatatgctggcattattgagtaataacttggttgattcattttactcacctagctttgcaaatggatctttcttcttagttgaatctttcttgccatcaacaatttctttgattttttgatcttcggcatcttgttttgacttttctttatcacgatccttaagtaagcccttagagaactcataaatagcgctgatactcttaatagcaatcttcgcattaactgaattgcctttgtctttgattacttgctttgctaactcatcaccagccatagccattgcaaacacttcagttaagtctttacgcttgccatcataattaattgtcatgcctttaagctccttaggagtcatgtagtcaggcttagagttaaactccttagcatcagtgtcgtcttcagaagcgatgccgtagatagcgctgattgaatatctacgagcgtaagtaagtgccttaccgtattcctgaggattaggactgccgatgtccaacatataagaaccgaagtcgaagatcgcacctttactattaagcaagtagttatgaataccggtcttgccaccatcggttactggttgctgaatataagcgatgtcctcatctgaacttgcttcttggatagctttgataactccgttcaagtcagcatatttatagccataaccttgtttatctttacttggctgttgcagctttctttgaacattaacaaatgcactcatcaaagccagttttgccttcaatgcatcttctggcttcaatcctgagatagctttgaagcaaatttgtccaatccagtcggctgggctttctaataattgcatgattagccctccaatccttgatattcaataccgttgtcctttaggaaactttgtagctgcttcatttgccatggagtacccttgacttccaacttaagtgagatcaccttgtctttgatctcaccagtttcaggatcaacgtacttatctccttgctttttaaggttgttaagttcattcaacttggttttcttttgagcttcagagacggcatctaggtcttccttgtattcggacattgcattaagtacgaatgacaaaggattattatctagtgctttgatccagtgatcagcgggcaaacctaagctttcagctttttcactgatgatcttgatgttgtcagcaagttgagcttgttcttgctgaatcaaagcaatttgttgatcgacttcagtttcaaacttagttttgctgtaggatttgttgtcccagcttgattgatatttaatttttgtaggatcaatttcagcaaattcacacatcgtcttaatgtgctctaaattattttcgtgtctttcggcttttgccttatcttcatatactttgataccagcactaatttttgcgcttgaatcgtcaattttagccactaacgattccactttatcgttaaaatctttaactggcgcttcagctttctttttaatttcaactttgcgtgccttaattgcttttgtaagcttatttagctttgcgcgggtagacttagcgtcttttaggttgtcttgcgttacatcatagttttcaagactttcatgtaactgatcaatttgatctttcatttggttatatccactgaagtcaatttgtgcaggtgcaaagttgactgggaatgctacagccttttcatctaatttaattaattgattttcgttcatgattagtactcctccatacctaaataactggttaatttttggcaattataagaatcttcgataaacttcaaaagatcatcaccgtagttgctaagatctaaaataaaatcaaaatggttaggtgaaacatcgttgtagtccatttcatctgctaacttgtttaaatctccgttgtaatgatttaaacgtcctttaagaaattgagctgcagatttatagccgtttacgaagtcgtcagcagatttgccaattaaagcctcacggccttcaggcaactgaacaactaatgtgtcagggtcattttctgcttgtatttcaagctcttctaattccttcttgcgattaatttgttcttgtgagtaaagcattgtggtataatctccttagttactttttggtttaaagatatttttctttgtccctttagctctgcaaagctaaagggctttttttatgcctaaaaaactcttgatgtaggctggaagttcagaaaagctcccgctagcaacatgcaaacaattgctattagcaaggcaattttgttggacagcgctaaggaaatgggcttgtctacgagatacaaagtatttaaaaatctgttccataatttcatgtttcctcctatttcttgttgtgcttaatgactaatgcaccaattacaattactaaagccgttacgattgataatgctggcaaaactacgtctggatggttctcgccatacagtacggtctgctgaaccactagaagtggtacgaagatgattgatagaaactcaaggatcttctcgaatgccatgcagaagtaactcagtgcgtgatccagctttgtttttccatactttctttcaatttcctttttagtcatttttctataagtaacctttcactccacgagttttccaaaatttatctaaatccgactttttccatcgtgtgatcccttcaattgtccgagacggaattttgtactttttacgccagcttctgaaagttgtatcgctaactccaaggtactttgctgactcaccaacattgagccactcacgtgaggacagctcgattatctttttcacgtcttttttatctagatttgatttaagttctggtttcatcgagatcacaatggatctcacaaacttagttaaattttcttcgtctagaagctgcatcgtttatcaccttcaatctgctacaattaaatcagccttcaataaggaagtgatttaatataaaatttgatgccgatactataactgccgtgattgctattgctgctataatttctcccgtcatagtaactatcgttaacaatgtgcatagtaataagttgagagaattagaaattaaaactaaacattttcaaaattcacaagataaaatttccactttgaatgatttagttacaaatttcgttgcagctgctaacgttcttaatacatatgagcaaacgggtggctggcaattaaaagccaacgccagaaatcaatttgtaaaaagcggttctaagttgctaccatatctttcacccgattatcaaaaactaatgcaagactggttaaagctttcgcaaattgatgataaaagcgcctggttttcgatcaccaaacacattaataatgaatctgttaatcttttaaatgatgtaaaaaagaacgcatacagtaagatcaattaacaaaacgtacaaataatatggccagcttaatgcaaaacctgtttgctttttgatcacttttcgatcaagcactatagcaatagcacttattgttaaaatcaaaataaaatataaatttttcattgctgaccttcttaatagatcgtggtatcagagccaaattcggctcccatcttttcaatttcttttttagtaatctcggcaacttttgaagctgatatgctttgcatgttggctttttttatttcttctctaacaatctttctgacttcttcacgttgctctggactaaacttttccatttagatcacgctcctgtctcgaattgattcgattccgtaaatttcttcgtaatacttatcagttctgtattccatgaacttgtcccacaattctaggcggtaatacaatcttcgtgctccgtcatgaataactgcttttttgtagggactatgttcacaatctcttgtacgtctcatcaatgtcgaccggctgattttcagctttgccatcatttcttgcttgtcagtaaatccatgatttacacccctaactaagtaattcaccacgacgcttcaattcagcatcgatcttgttggtttgctctgttaacttttcccattcttccttagtgatatcgagtgccattctttgaataagcaagtcgcataacttcgaccacaattctttagtggacatagctgctagaattgtcattttttattacctcctagacagatgtcactcattccaagttgatcacagatgcttgcgataatttcactgttgagatcttgaagatctttgatagttgctggacgtgtaacaccaccgttgccatcgaactctttaaccattccaaactctgtttttgaattattaagttcattgagtgcttcaagttcttcgcgtatgtttttgtagcaattcatttcaatcacctcctatgcaatgtcgtcacgttcaatcagtggcaaaatgtcgttatcttttagaacgtcgtagataagttttctacctgcttgcgtccaataagttgtcgttctgcttcgatctctgccacgatgatcttgaaaagtgaatgccttacttgctacgtaacctttacccatgtatgccttgtaaaggatccattgaccgttgaccttatgctgaataccaacagatttcagaagcttgttaaatgccattgcactgtatccgtaatctgctgcgatttgagtagttgctagtagatcaggagtgccaaggatcacatcgagataactggcctttttgttactttcttcgagttggatactcaagtttttgttttctaatttgagttgtttgattcgagcatttgaaaattccaatgctctatgcataaccatttctgggctgttccatttacgctctaggtctaggaaatattctctataaagctttgacttttctgttcttgccatcattgctaattgcttagccatttcaatggttaataaataatcatctaactcacgaacagcgccgttgttaacaaccgtacttgatgtacacttgtaaaaatcctcattttcagtgaatagttctgaattagttttgaaccatctgctaaatcttccttttagtccaagacctttatgtaagtctcttgcactaacaagttgacgatcgtttttgacttgaactttcattagttcttccatttttgcactcccttttcttctcaaaacgggtaactttatttcaaaaaaatatctggtgagatacctaatgctttggaaaaagctaccgcaaagtcagcatcaaacttatatcttccattaagtcttccgcttagtgtaggctcactgattctcaatttatcagcaagccagctctgcttaatgccatgatcacgcaagtattgcttagccaatgctcttgcgttgtctttcaagacacttgccatccgaccatttcctttcttctcatttcgtgtaactcgattacagttatatattactacccattttgagaagagtcaacatttttctttactttttgacaagaaatattttcaaatagtaaataagaatttacaatatactcagagagagaagaaaacaaagaggtgcagttatgagtgtattcggtaatcgactaaagacaatgcgagaaaatgcaggctggactaaaacatacgttgctaacagactgtatcttccattaactacttatgcaaattatgaatatggtaaaagagagccagatataaacactattggcgctatttctactttatttaatacaacaaatgattacttaatgggcaagactgacgacccagagcctaatccatccaatttatcctctgatgacttggctgaaatgcttaacaacgtccgcagttataacggcaagccattcgatgaacatgacaaggaacttctcacaactttcttaaaaggactatacgctgacaagtaggtgttttatatggatagtaatttgaaaagattacttaaaagaaattatttgggagttgcttatttgcctattcacggtaaaggatatctagtcagaactaagggaaacaaaaaagactacattattgttaatgagaatctaagcgatgaggaaactgaaaaggttatccttcatgagataggacactacgaacacgacaaggaagttcttggcagttataagcacaatttaaggtcaagagctatcagtgaacatgaagccaacaaattcatgattcaccaagaaataaagagctatataaatcaaggctatgatgccatcaatatcaactacgttaacttggctgacagtctgggaactaaagattattttcaagttaaggaagaactagaaaagtattgtgaataattcgtccagggtaattggcaccaatgacgttaaacttcgtgcctagtttatggaggatatagaaatggcaaaggaaataaaaggtgaagatggcaaaacctatgtcgtcaaagaaaagaaaccttggtataagcgctggtgggtctgggttatcatcgtgattgttgcaatctttatcgctggcggtgctttaagtgatgatgacgatgatgattctgacagcggttcagcaaagacagagcaaactgccaagaagaaaccggcatcgcataagaagtctgctaaaactgaatcaagcactcaatctaaggagtcaaagcctaaggaatcaaagccaaaggttccagaagaatataagaacgctttagccacagcagaggaatacaacgaagaccaaccaatgagtaaggctggcttgcttgaccaattaacttcaaaagacggtgaaggttttacacaagctgctggtgaatatgctgttaaccacattcaagttaactggaatgaaaatgctttgaagtgtgccaaggaatatgaaaagaccgaacacttatctcgtgcagacgtacaagatcaattaagtggcagtgttgatgatggtggcgagggtttcaccccagaacaagttcaatacgctatggatcatttaccaaagtaaagaaggcttaaaaatgaaacatagatttttagtagctgcattggcatctgtaatgcttgccagcggtactggtgcagttatcgcacctagtcattcaacacaagtacaagccattagcaagtactcacaccactggcactgggtaaaggtaaccaaggaaacaccaatatataaggtcaaggttggacgttatatgtatcaaagtaagttaactcataagacttacattgagaaaggatcagacttgaaggttatgtattccggtcatgactacccatggcgtgtatacggtggctggcgtggtcactgggttgctttaagacaatcagcgaactggttcaaaaacgaatagaaaacaaaaatcctgcctaccctattcaggtaagcaggatttattacacagttggttagaacgttagtttgaaaggatgatgatatatgcctcgtagaaaagacaatgagatctacaagtacaaattgaagtcgggcaaggtcaagtacggatttaaaacgtatattggaactgatccagaaaccggtaaggcagttaagccatctcgccagggctttgacagctacaaagaagcggaagcagctaagaccaaactaaaagaagagggtcctagtaagtttactcataagaaagaacagaaagaaaaccgaaaaacggttcaagaagtatatgagatttggctagaagtttatagagccgatgtacgtgggtctacgctaagaactcggaaatctaattggaagaacaacatagagaaagaatttggaggcgtatatatcgacggtatcgatattaaccacttacaaagctttgctactaaattggcggaaactcatattaattaccgttctattttaaacttattacacagagtaattaagtatgctattctacgtgattggtgcgacagagacccttttgataaaattgtgatgcctaaaaaaacgaaggcaaaaagtaagcaccctgctaataacttctatagtttaagcgaattgaaaacatttcttgaatgtgccaaaaagtataaagagaaatattacgtttactttatgacagtgggtaatttaggctgtcgcccaggtgaggcactggctttaaagtggaaaaatatcgacttcaaaaacaaggaaatttttattcagcattctatcagtacagatgaaaatggcaacaaaatctatggtcctaccaaaacacctgcgtccgttcgcaaagtccccttatcagatcagttggctatagtactaaaggagtataaagaagaaacaatctataaaaaaggcaatgattttatcttccacaaagataatggcgatttttatgagcgtagcgcaccagatcattggattacgacgctctataacaactatccgctacgaagaatcactcctcatggctttagacacacactggctactttactaaataatagaaaaaataatgcaaacattaaagatatacaatacttgctcggtcataaaaaagcttcaacaaccatggatacttactctcactttacaaaggaaaatgaagagcatgttgcggaatcgatcaacaaattggatatataaaaagagctttttacgtaatttttccgtaaaaagtctcttcactatagttattactgccgatttattgctgttaagcattgatatatcgacatttattaaattttgttttgcttaatatcaataatcataccattaacagctgattgtgcgccgtcattaacccacttgttttgacctgcttgtttatcaaaataaagcgagtaggtaattgagttaactaattgcattgctccttcaacatcaccctgctcccaacttctaataattaactgtagcggattaaatgcaattcctttgtttgggtcatctaaatttaattcataaacatcatagccacgcttcctcaacgtatttacagaagcaacatacagttctcctttaggatcattcacgactagtgacgattgtttttcagccctacttactaggtcgatttgttctaatatagtagtttcacctttaccagaccgtgaagtaccaacaatcaaattatgaactgtacttgtatcaatgaaataatagccatgtttagtaataaatggaaatttttgggttaatcctaatctattaatgtgagcaatggggaacccaccaaaacctttaaagctaggctttttaggatctaaccctggttgactatgatcaggaacttttacataggtgtcttctaattccttaactgtagtaaaacgggcatttcccttttgcccatgagcgactttttgactttcaaagtggaatttttgacttaacaatccaccaataattacgctagcagcaaatacctctaaaatttccatgggcttcaactgtgtcttaaagaaattcaagccagctaatcccgctttatctaaatcgagaccattcgtgaataagttatagtttttacttttagtttgtaacatgacattatggaatgctcctaataaccacattattactagaaagataaaaattcctataaccaacgttgttatcagcttcgtataattaaaattaatattgctagactgcttgttttcatttttgggacgatgtaattgtctttcaacttgatacaagcccttttttacaagattcttttccttgtttctagcattttttagatttattcgtgatcttctttttttagtacgcatatctagctaaccacccatcttgccaatcagcaatatcatagaaagccaatgcgacagcttttttagctgagttggaaatttctgttcgctgatcatcagttaaacttagccaaatatcccttgtctgagctttgtcttcattagcaatggcactgtacaaactagcaattggatttgaatatattgtagcaatcttctttaaatttcttgcatcaccttgccctaataaaccatctagcatatctctcttttgtgcccaattcttagtttcacgatattgttttaaaacagcttgtgacctagttaaatgggttggagtagatttagtctttgatttagcattaggttttttatttttagcaatatcttcattagctgattttttatcagattgcttactacttgattgcttgtttttcttgacatgcgagtttgaacttgatcgttcaattgaagctttttgttcattattagaatggttattagtataagcccatgtaccacccaaagccgcagctgcaaggcaaactaatgagataatttcagatttatagtgacgtttcttaggactgttatcctcggtttctggctttaactctgaatcttcttcatttgattcagaatcaattggtgcatcatttttcttagtatcatctaagtctactacttcaccatcaacatgtggcacaggcactaaagcattctttccatcattatttaaagtaatttttacgttaggattttctaaattattttgagtaattgctgcagcaattgctttcgcaaattcctcaggcaactttgccatattttcttgttgcaattttgccaaagactcattctgctcaattgctttttgctttaaatcaagttcacgttctttgcgagcagcttctgcttctcgctgacgcttttcttcagccttttcttgatcaagtagcttttgttgatttatttgttctttagctaatcgaactttttcttgaaccttctttaaattgtcttcaaataaatcattattcttgtcatagttatttctaactgcatgatcaaaatcattactaatggttgttctactatcatctaactcagaatttcgtttttgtacttcttcatcacgcgcaacacgttctactttagctttatcagcctttaattgctcatcaatttgttcattagcattacgagttttaagctcttcttgatcattaaaatttttcaaagctatattgcgtttttcttctaattgcttcttatactcagctaatgcggcttcatcattagtctttagttctagtgccttgttttcttttaatttactcaagtcagattgattattttgcttttgatgagttgctttaactaccagttgttgaatctgtgccgctgttctgtcttcaacaattttatctagtgactctttagtaactctgttatatgcttcctttaatctatctacaattgcagcctttgatttcgctaaaccttcatcatatacacgttgaatatcttgcattgaataatctcttaacgcctgatcaattttatcattcaacgcttgatcatattgatctttaggattatctaaatagcctaaatcatgacgaatattatttagagcaaattgatttttatcatatcctcttggcaaacggtcaagaatatcattggcatcggtatatttgccatagctaattacttcactgcgactagtttctgtttcagttgtttgacctgcttgaattggtaaagcatcaacctcttcaggtaattgtgtaggaacattattcaaactaggattggttgcggcattactatttgattcttctgttggactgttatcctcagtctcatcatttacatcattttcaggaggtatttcatcacgcacttcatcatctgaatctagaatttgattattattaaacatgaacccattgtctttatttaagtcctcttcatcatcactcaaactaggttcaagttcattaaagatttgatcctttagtgttgttactgtttcttcttgatcacgagttaaattttcattctctaaatcacgatcaatcaagtttaaaatacccccgtcttgatcctcaggtaaaatttgtgcttcaaagctgctctcttcacgatcctcatcttcatcatcaaagatagtaaatgtaacattagaatcagcttcttctaagctctttgcatagtccttaactgcatcatctgcagttttaatgtctaattcaggcgattttctacttaatttatgcttaaattgaaaatattttttcgccccttttggtaccttatcaaaggtaactaatagcataatcttctctccttctttaacgcccaccatcaacccagtaagttaaacttacttcaccttacttacaaaactaactatctagcattccaaccaaacatatttgcgaatgatggtactaaacttgcagctaaagcaacaatggcaacacctgccagtgcatacatcaataattgctttgcattttgcgacattctgttaccaaaagcgaaaagaataccagccaagataataacaacaatgaacagacctttggcgatactcttcaggttcttttcggtactaccagtagccttattaatattgctccaaacactaagtaaaactggatgttcgtttaaaaaagcctgagtaccgattaagccgctccaaaataagtaggtcaatttggtataaacagctaaaaacattgttaatcctccttgtataaaaaaagcatttagttagctaaactaaatacttttacttgtcccattaaaatcacttgtaggcttattatcatcttttgatgacgtaaccttatcatttaaagtcttatcaggttcagcaatctgtagtttctccagctgctcggataattcttttttacctgcgacttctaaaactgcatctttatatgcgcttttagtgcctgagatcaaatcttgcacaaactcaaccataattttttcttcccaagccttttgtgttaagccttgggaattatgtagcttgcgtaaaatggacttgtcttgtttgctaagaaccatttttcctccttaactattgcccaccatctcacccgaaagaaaaagaaggattagactttctcaccatttcatctaatcctttatacgttattcgtctttgttacctggtaatgtttcagtttcacgcttgttgtatttatcagtgtttttattcttgtccccatctcctgttgggtcaacatcttcactggtatagtcgcctgaaacctcgatcttcttatctgcagaagcctttggtgtctttggcgatacgtgagtaatattacttggaatatcttccttattgaataagaaatgagcttcatttggaatttcaatcatgctggtatccttattcaagtagtcaagaagcttaggagtattaatccaagtagtatcaataaacatcttcaaatgcttaccgtgccagtttgctggatcatttgcagtccaagaaatcttaccagtcttgttatcaatttctagcttaccttgatcggtgatttccttagcattacctgctgcatccttatcatcataatcataaactttaacgcccttgatattttgaacgtctgattcaatagtatctttaatagccaaactatcaatgtcaacgttatctggaactgttgcttcaacacggtatgtatacttcttaccaaagtctacatctacaagtgacttagtattaccaagtccatcattagaaacaaatttttcatccttttctttagtaaacggaatatttgttgtaacaatgttagaatcagctgaaccattatcagtaattacctttgactggttatcaattacggcttgatttttatgcttaggatcagcgtgatcctttagactcttacctggtttaactgtagcatcaaagctgatcttataagtttcacggtagaaatcatcaagagccaatgtatcactcttagcaattactgatagattattgccactcgatagagttacagtgaacatgtaggtaacatcttgattttcacgattataaacacggattgaaccagtatcaatgttcaaaatattatctaaattatcagtaattctatattcactatatttaaatctatcacgtacatctggtacagaatgaacaatttgatagtgatattgttcataacgattttctagcatatcgtgagttacagatttaataccaccaatttcactaggaacattagtaccttcatccttatctgacacaaactttttaggatcaagcggtttatctggaagtatagccctgccaccaaaagctaaatatgcatggttaaaattaccattccaaattgatgaagcaattgttccaattttatttttttgtgcatcagcgtcataattagaatcatttaattgccagtaaccattggttgctaacaattcattttgtgattcgacagcatgtttacctgtattagtaccataaacccaggtaatattcatatggtctgtattggataaactagttgtaaatccaccatataggttagaagattttacagtacctgacccatcaggtaaggcttcatggtgaaggttggcatcagaataaatatattttttacccattttatccatatatgataaccaatttttaccctcttgatcgccatagtaaacattatcaatatgactataagtcgaggagtcaaaacctacccactgattaccgtcaatgtcgagaaatgtcatttgagtatttaacttaactggcttccctgtatcatgatcaataaaatcaacacgataagccaaggcaccatcaccaggagtaaagatttcaaaatcgtcaacaccaaatgcggcatatggattttctaaagctacttttttaattggttcagtagaatgatcccatttataagcattaatcttccaatcatttaaagttattttcatatcaagtgttttgccagaaactggatctgagccaacatttgaataataaacaccgattttaccctttaaattttcattacctttaagtctaaaagcgtcccaagagtgtgatttaccttctgtatttgtagatgaagttgcccaatctgaagaagtaccaccaaaaggacttactttagtaattcctttcataaccttgggtctaaaaccatattgtcctggaatttttgcaccagctgccttaatacctttgggcaaatcctgcatttgagcattatcagccttaacagttgtacttgtcgcaaatcctaatgaaacgattgctagagcagctcctgctaagccgattactttattactttttaatcttgtagtatccaattggatctctcctttacttcttaatcaatttattcttgattccagtgattttttctttgaaatcatcgtttgtcttgtaaagataactaccaattccacctgcaatagccactaatgcagcaataaaccatcccgcatgttgcatcataaagtgaccagttctaggtaagaatccatttttacctgtaatagggttatttgatcctggattgtttgttcctggattattagggttgttaggattttctgaactatttgtaggattcttaggattatttacattacttggtgacttcttatctgcctgtggtggaataacattaacggtattagacttgacatccttaccatttactgtcatatctgcagtgtttggcacttcaccattgactttagaatccttctttaacttagctgtaatattagctgtatacttcttaccacccattttgcctactaaatcagccttaggcttccaggagaacttctcagtattcttgtcaagcgtaagttcaccttggctagttatatcattcccatcagcatcagtaatggttaccttttcaagatcaaggacatcttctaagtcgtccgcaaattcaacagatttaacatcttgtttatcaccgacagtatattcaaccttgtagtcaaagtctttgccttcttgaaccttatctgattcaccccattgacctgattcagccttaacttgcttatttaccaagtttccatatgggtctggggtcttaccatctggtttagaaggatcgttaggcttatccttcttaggatcttcagggttctttggatcaccattaagcgtagtatgaacaacattagttggaatatcttgaccgttaatttgcatatgacctgtattaggaataccgctattgtcatagcttgatacatctgcatttggtttaatgttagaagcaattgcaacatatagtttcttacgtgagaacttagctggatcattagcagtccaagtaaagctttcatcctcgtctgaagtaactaacttaccttcgttagttacattattaccatcactatcaatgatgacgacattctttaagtcaagcacattctccaaatcatcacttaatacaagtgatttcatattttgagaattaccaatatcaaacgtcaacagataatctacagcatcaccacgtgaagcctgattgctatctactgttgaagaattaataatttctttcaaatcttccttagaagttggagatttagtagtaacttcactagcgttctgcgatgaagacttaacaggattcttataaggcgtttgaagaatttttacagcttcttcatattgcttgtctgttaccttatcgtttgccttactccatacaccagtattagggtcaaccttaacgtattcctgtgccttttgatagtcctttggtaaagcaccatcagcatcagattgttgtcctgaagaagtttcagacttattgccaaagaattttgcccaatctgaaggattcttaacaattcctttatgtgtcttaggttcctctacctttggggtcacaactggagtattcgatggggtgtctttaccattcgccttaaagtgagccgtatttggaatttcgatggtattgtttttaatatacttttgtaaatctgcattgtctttgactttagcagtaacttcaactgtatatttcttgccaggcataaccttaaccaagtcagcatttggttgccagttaaagctttcattcttttcatcaagcttaagtgtaccttgttcagtggtaatatctttaccatcggcattcttaacaactaccttttcaaggtcaaggacatcttctaacttatcggtaaactcaacatcggttaaatgttgcccttcacctgcagtatagtcaatcttataagtgtagtctttgccaacctcaacattatctctatcttcatgataggaacctgatagtccttgaacacttttaactaccttattttcggctggaggtggagtttcaaccttaacaggatttgaaggaatatctttattgttgtacttcatatgagcaacattaggaatttcgtaattctttgttgctttattcaagtatccacttaaatctgcatcggtcttcagcttgacagtaatatctgcagtgtagatatgctttggcatttgagttagatattctttagaaggttgccaagtaaaactttctttatctttatcaagttttaaatccccttctttagtaacttcatttcccttgtcatcggtgatcttaacgtcttcaagatcaagaaccttttccaaatcgtcatagaaaacaacattactaatgtctttaccattttcaggaattgaatattgaactcgataatggaattcatcaccagcgtcatgcttggctttttcaccatattgaccgttcttatcctctacttgcttaattgcagtaggttcttcatcattcggtgtatgaacataaacaggtggggtcttgatcttttcatcgttatagatcatttgaccaacattaggaatgttgtattgattcgtattcttatccaaatacttgtctaagttagcattcttttgtaacgtggtttcaattcgcatgcttaacttcttacctacccaatcttgaggcttcttagccgtcatattggttgtatttgtccccttatcaaaatctgccgtaaattgatcagtaacatcagtgttaccatcaaaaactctggttttattatgagtaaacactggctccaatttatcgaaaagaaccaatttctttagatctgcattgtatggaacttggtagtaaatatcaaaagcaatatctgatccctttttaaaagtagcatcactcacatatttcacatcagctgttgcatcagccttaacaatattagggtttgcattatggtttgcgactgctacacctacgcccacactacctagagttgctgttacacctaatgcagatagcaattctctagtttgcttttttgatagctttttcaaggctattcctccttaatttaacaaaaaaacacctgcatttttgtcaatgtcacaaatcaaaacattgatttatatgtaggtgttttctaataatatataattattggcaattacttgtcttttgataattgcttgattttgatagaaaatggtttatttgtaccatcttctaaccatgcataatcaagttgtgcattttcactatcagcgagatcattagctttttctgtatcatagtgtaattcaatattattgtcatacaactctcttaagcaagcataaccaagaattgccaagaaataattcttatccttagtcttatcttcaaagacatctggatacaaacgactcattctttccattgcatcaatatattcactttccaacattacggtttgaaaagcataaggtctatctaccgctgtataaggagtatatgctacatatggaaaacgtccataatacttgctagccaatccttccgaatacttaaggaataaccagccagcccataaaatccgaactgaagccactcgattgtcttttctatctactagccatgcaggaaacctttctttaataattttatttgtatcagcaagcatagcttctggtaattcaaaatctacaaaaacttgttttgccataacattttcctttctaaaaatcaaaggaccctctaacatacttagaagctcccttataactttctgagccagtgtatttaccacgaataaaaagtctaccttgacctgtccagtcacaggtaaacaacgaaattactggcttcttcttaaactctttattattccaagctaatcttaaattataaactgaaataaagcgtgaagatgtaatcttgtaataataaactttcttataatctgttaataagattgttgttccattaggtagatttcctcttaccttcgcagtatataatgggctaaagaacgaacgcccatcatccatattatgacctgctaaagcgtaattgcctttacccatcctctgatattggttcattgttcctgcacctaagttcagttctacattaccaactccacgatagatatttaatagaacattatgatctcttattgctatttgtcctacagctcgataatctcttctatgttgataagcatttgcaagagattttggtgatacaggttcaacagctttcatattatagctaggctttttcttttgcttgttctttctttgacttggtaagttcttagtcgctacataattagcagctctaccttgaagatggtcaaagtttgcaatgcaataaattgcaattccgattaaaagcaatgcgataatactaactattgtcccaattcttttctttttatcactttttctctgttgcttgatagctaacctactttctttaatcttcataatttaggtattaaaaaagtcaattagcttaactaattgacctttgattaattttacttacttgcttcccaggctttaatccattctggagcataacttcctacaacagtgaagttcaacttcaagccacgttgagaatatgtgccactaccatcatatttaaccttaagagccgcataagcatacttatctttatgtccttccaacgttcttaaatcaagattaaccaactgccccaactgataacaatgttgcaacagataaacttactaaaatattctttttcttaaacataatttgctcctcttcttactttcttactatttcaacacatagttttttagattttttcttactcttcacctaccttaaattatactaaatacgtaaaattagcgtaataattaatccgtaaaatttttattgtttcaaaatatactcttgcgtacatttaccaaattgatcataagtaaaagataatttcacttgatcattttttcgagaaagcaatgcccgtaaagacaaagtctcacctcttcttattggcgtaaattctttaggatatctttgtgctaaattattacgatagcgaacatactcgtccgcagttaatctttttacatgtatttttttcataacgctgatcaagcgatcaacgcaatcaaaattattcataatttttcatcttaatcccatttaaattgtgatctctttaattaccaacggttttacgctatgaccgataacgatgatggttttctagttagccaccaaactgtaagcttttgtacagtacgtagcagatagcttcacctatctctagcctctcgcttcacgcattccgcaagctgtcctcttatcaatcctaatcaaagactctttcttgcccttcagttactacaacacttaaagagttaagtttatcgactcacttactattgttgatcacattccgacttcttatttactcttgagtttttcatcaaggtattcacatgtcaaaacagccaaaaagaatgtatgcttatcttttagtagcctattacagccattactattacttcaaatttaaaatttcgttcaagctaagacttatcatcaagccaaaaataatagtaatctttattgatggacggctatctccatctcggcaggtgtgattctttcttcttccacccgttgtgccttcaattctctgtctcgtaaatcctactgagtcggctcagtagtcatgcacacgtcctacacccgttccagagcatagttgacgcttattctgttttcaatgtactaatggactgtttaccagccctaaaagaactagctgagttgaacagctaaattaaagatcaaagatcaataaccgtaccgactttcttaatgattaacattctaaagcttttacttcttttacctggttagttacaactactgctacaataattgctcctgtcacagctaacgcagttaaagcaaacttgctaaaatttttcatttttatcatctcctttgattttcatttacccattttttcaatgcaactttatcaatttcaccatcttgataacttctcaataattttaaataattacttctggcagcttctttttgcttaattcgttgcattaacttttcttgttgccttttggatttcttaagtcttctgttaactgaaaaacttggtggaaatccttgatctcgtgcaattatttcattagtctctgctagttgtctccgtaacccattgatctgagcgtcatagccaataagaagctctttaggattatcatccatatttttcttcaaatttttcatatttaagtacgctcgccatacatagtaaacaccataaataatcagtgctattgttataaatttatacataattttttcctcataatagggcggaaagattcgaactttcatacaagcattagatgcatgagtatcttaagtggatcaaattgattaagttttgattccgaatgacgaataagaggagcatatcttctcgtcgctatgaaattatatagagaaattattatcaaaatcctgcctgtatttttacccattaaattacgccctagttttacattaagtagctccaatagtatccaataaataaaatcattgtccataaagtaattgctgaaacttgcagcaatactgtcacaatttcgtctaatttttcaaaaaaaatagcatattttgtaccggctaagctaggtaaagttgatattgccatcagtataataaaaattaaattgcctattccaaatgcaattactatatatcgaaaatgctctaatataaatgaactgatcataatatcttacctgctaacatcaattagcggctttttcctatgatgatcgggatattttcttttacacaataacctgcgatgtcctaatttaggatttacttcaaatccaaagcctaaataaatttgatcataaatttcacttacttgataaaagggtattcttttatatctattatcatttttacgatatttttcagttgcaaaataacctgaatccttaacaaatactccgtcaatgttccaataatgatagccatctattgttaaaatttcataaacttctttttttactcgaaatacactaaaacgtctattttttactgacttccttgccatccaacactcaccaatcatactatccttaaaatggtaaatcagcatctgttaattgaacttctttttgattattaaaaggatcttccgctaatttatcttgcttatttgcttctacaatagttcgatcaacttctggctcttcatcttccatattattcatattttgtttatttgtattttgtgaagggctattggctatatcctcattttgactagttaagatatcaaatgaattgacccaaatatattcatacgctactctattaccatttttgtctacaaattttctaaccctttgttcacctgccaagattacttttgaccctttatgtgtattagctactaagttttcagcaactttattccaagcaattacatggtgccactcaccaacatagcctctttgaactttactataacggttttgacaaatagtaaaggttacatacttttttaaagattgagtagtttttaactctaaatcttttccgatgtaaccatccattacaacttgattaatcatatttctcgctcctctctcttctaaaatatttttgatatttatattatatatcgtttttgcgatatttcaagactaaaaataaaaaagatacagaatttttgttctatatccttaaactagctatcataactacatctaatttgctagaatagctttagtacgaaaaagttaaataagcggtggtactttcgttttcatggaggtggtgccaatggtgtattaactattgccctaaaatctattgaaaggaggtacagtttgccaaatgacaggctttttacagtctgtcatagccgtaatctatctgctttgtctactggtagtaagtctcatcttgcttaccaaaaaagtaacggagtggttcaaagccttaaaagatatgattgcagcattccacgatttgtggaaaaagtagagcaaactaaaaagccgctcacaaacttttggcagagtttagcgactttttagttgtataatcaatgccaccgcccttttagcggcttcgtactaggagagctattagcagtaactctctttttttttgttcactaatattatagcaactttacgctaaaaattaaaatatttcaacaacttattaggacacaaatgaccctaacattgcattcacacccaaaattggcaattgcaccgaactatattgggtgaagcttaattatttttgtcatgcttttgccttctttacttctttgctctgcttaatttttcttttaatccaagcaatacccatagttacacccttaattcctagaaaaattacgccaattactagtgcaattctccatacaccatccatcagtgttaacagagctggaaaaatcagatagattccgaaagcaagccaaaccaatttccagagatggaatgctgaagcaagaataaagacccaaaccataatccaaaaccaatctgtttgtgaaagtactaaaaacatagcgttctccttagcattaataaactcttattacctttgtctgaacttgaggaatattacctctagtattgataactacttgcaaatcggcttcaatttgccttgcttgcttagctttaaaaacttttatttgatttttaggtacgattgccttaatcactataggggtatcgtcctcaaaagaatgatgatcatttgataataattcaagcatcgaacatccttgattcatatcaacattcatcactttaagcgagacagacttataattcacagtttgtttgtctcttttggtaactctattaacatacttttcttctgcgtctgtcttgttaaagactactgctatccaaatcaaactcgtaagaaagtaagccaaatatatgcttaaaaataatttcatagctagctcctttcaactactactagccattttccctcgccagcatacttaattttttgattagctttaatgtcaatagattgatcgttaagttgtttaacacgaacataaaaactattactatccaacggttgaattccaagcacctcacttctaaagcgccaagtaaaaactttagctaattctgcaggtgtagctagcattccaagatataaatcatatttattcatcatgaacccccgacatattcatataatcttcaaaagttttcccaaccaagctacctattttggcaatatagtcttgatcatagattctgctgtttaatactttcggactattccccattaatcccaatgcttccccagctaaatagctgcttaattctagcctttgtttatcactaagtcgttgtccatctagttcaagatcatctgccatactaagaaacgcaatggaaaacaatatatcttcaatttcttgaatatcaattttttcattaagcaagtcttgtgcaactttttcatttttaggattcattcttacaaccccacatccatctaatcaggttttctttatcaatatcttgtgatcttatacaaaaatatcgtaaaattgatatattaataatgatttactacataaaatttaaatttttaaaggggcaatatcatgaaagacaaacttaaacaatccatcatcgcaattactagtgccaatctcaaaaaaattttatataatcaaaaactaactcaacgagacttggcaatgctaactggaatctctattccttcgattaatcgttattacttaggaaatggtgccataccacaaaacaacttggttaagatcgctaaagccttgcatgttgcacccgatgaacttgatccttcatatcagcccactaaagatttcttgtctcaattagctgaaaaatctgataacccagatttaaaattcagaactgactatcttaaacagttaattcaaactagtaacttatctgttcaagaagttgctagcagacttaatataaagcccattacagtctataaatggctagcaggggtaaatacccctagcaaggaaaatacggctaaattagctgatttatttaacgtcagcgctagttctctagtaaacacttctcaagaagttgagttaacaccgcaacagaccaaaatattgggtactttaccacctgatttaactgatcaacaaacagatttaattgtttctttgattaaatctgtactaaaaaatgctaactagttttcgatagattcatacatgcttgaaattccactaattagtgctagctggcagttaattctccattgccaccagttaagtatgtattcgacttgatcatttgaatctagcatggttactgagctagttgatacttgcaaatctgaatcttctaggattgttttaatttgaattgcaagattatctgacgttgttttagtttcttgcttaactttaaggtgattatcgcttaaaatgtcgcttaataaacgtgaggactctttcaaattcagcatccaattagaaggcaacaagtcgtcaatagcgtaacctaactcatctactttgaatataaacttttcaaaattttcttttttacctgttaattccatttatttctcccaactgattaaatctatagctctttgtggagcgttatttgtttacatgtttttgcattttatcttagctggtaatttttgcattccagtcaatctcgtgttgatgtttttgcatccactcacaagcttctttagcaaaaataattgtagttttaccagctggcgtttttctggggtttactacgaatccatcatttttataatcaacttctggaaattcatcgaaaataaaagttcttacccagttatcacctttgccacgacaacagtattttctaaactcatcgatattccaagtcttgccagttaagtcttgcttatctgcactaacagattcttttacaatacttttaattagattcgtaaggcttggaaggttgattaatgtgtcagacatatcttcttgcattgctatccccagctttcataatttctatcatttgctaagccatctctcagcatctttaacaaatagctatatggtttgcctaccatgtcccatgacattctttccttgaatttatccttaactgcttgcaaagtatctacgttgcattgatataacagcccccgtaactgtttaagctcatcaagtgttggattggtagaatgattttttagcttatcgttcatccttgcaatggtaaaaaactctttatagattttttctctttctggatcttcttctttcttcgcagaagaagaattactaactgtattactattaaatgtattactagatatattactagttgataatttattaaatacccctttagtattcttaatacccctatttagttttttaacgggggtatttaatttactaactacccttatagttcgttgcgtaacgttattctttgttgaatacatagtggtgatgtagcctttttcttttaagcttttgactaattgtgatacacgtcctggtgtaattcccaagaaatcagcaaaaagcttattactagcaaaacatccattttctccatcaagactgtcaatttcagtaatcaaggcaacctccatgatagttagatctttatctagccaatactcagcaggtatccaaacacctttaaatttatgatttgcttcactagtctttcttttcttagtcattgttattgcctttttctttctttaagtactcccataatgcggtcacgatcaaactatttttcgttatgccacgataagaagctaacttggttaattcttcgtccaaataaataggcactcttacgcctgtcgttttctttggtgttgtcatagtgttatcacctcttgtaattatattaaagtgttatcactttgttgtcaatggacattttatatgtttctttgatgttaaaatgtaatcaaattgataacactattggaggtgcataaattggcttctaaattacctatgtttggtttgagagtagacccagcattgatgaaaaagcttaaatatatagcttcatacaacggacgttctgctaataaagaaattgagcaattaatcatcaaacacgttcagcaatttgaaaagaaaaatggaaaaattaatgcttaatttgtttccatagcacattaacaattaaattattaatgctaatttgtttacgctctgctaatcgtctaagaccttcatacaggtcattagacatgcggagcgttatttgttttcgagtcattgctatccccagctttcataatttctatcatttgctaagccatctctcagcatctttaacaaatagctatatggtttacctaccatgtcccatgtcattctctccttgaatttatccttaactgcttgcaaagtatctacgttgcattgatatagcaaacctcgtaactgtttaagctcatcaagtgttggattagtagagtgattttttagcttatcgttcattcttgcaataaagaaaaattctttgtagattttttctctttctggatcttcttctttcttcctagaagaagaattattaactgttctattagatgatctattaactctgttatatttatgtgacatgggtgacactgggggtgtgacattggtgtcactacccttgtgacgctcagttccccaccctagtgacatgcatgtcataagggctgaaccagcatgaatttttcttcctaaaattgcaccatttttatcactaacaactttttcacgctcaattaattttttcttttcaagcaaatccaaatatctattaacctgacgacctgatacttttaaatgttctgcgattttttggttactcataaaaaactcgccagtgacattaagcattgagataatttcacccattaaaagtatcgatttaggttttcttaataaatcttcatctcgtgaaattgatggtggaatcatcagaaatgctttagatcctttaaattcattttccatctgttatcctccctttactattcttattggttaagcacttgattgctcagcatattactattttgagtagttaaaagcgctaaaaaaaatatcatctttgctaactccaaaataatcagcaattttttgcatcataggtggtcttggagtagatctacctgtttcccatgctgacaccgtaacttgcgttgtacctaaagcttgtgcgagatctgattgactcatgcctttttcaactcttaaaattttaagcttagttaacatttaatacctccccttaactacatttatatattatactattttaattggtatttcaagatagaaatcaaattaaaactgtttttagtagtaattcactatttttattagtattagtagtaatataaatgtaaattaatagttaaggagcctagaaaatgaaagattatgatagaaagaaattagcaaataatatcaaaacacttagaaagcaaaagaatttaaatcaagcagaattaggtgaaattttacatgtttctcaacaaactattggatcttgggaaacaggtcgagcaattcctggatcagatacattaaaaatattagctgactattttcaagtaagtactgatgagttactcggaagaaaaacatctggttcagcaaatgacaccgatctaagtgaaatgattaataatgctagattcttcgatggcaaaccaatggacgaccacgataaagaattagtcagagatattctaaagagaatttacaatgaaaaataggaaaaggtgtgcattatggacactgaactaaaaaaaatacttaaggaatcacacataagattagaatttgctcctctacactgcccaggtttgcttgttcatggtaaagataataagcctgatgtgatgatagttaactcaagctatgatgatgagcaagctaaaaatataattctacatgaactgggacatatgatgtacgacaaggatgtgcaaggtgattatcaaagcgacgactgcgcacacacttgtagtgaacatagtgctaattcctttttaatacatgaaagagtcaaacaatactttgcgttaggtaatgatcttcaaaccgctaattggctaaactttgcccaaagtatcgggacaaaggattactttcaagtacaagaagaactaagtaaatataaatttgaagaatgagtctatgaccaaactaaatattactaactatcaaaaatacccgcctacttcactatagtagacgggtcaatttatataagcagcatataaataacttatacgtaatgcataaataacatatgaataatttagatttaagaggtaaataagatggcacactttgaaaaaagaggcactaaatggcgagcacaagtatcttggtatgatgagcaaggtaagcgttgttttaaagtaaaacaggggtttctaaccaaatctgcagcaagaaaatgggctaatgaaatggaagttgcaaaagatgataatcaaatatctaatcaagaccccatttttgctgattattttaaggactggtacgagacctataaaattcctggcaaatcaaacaacactcaaaatagatataagcacatttatgtattactacaacagaattttggtaaaaccagaatttcaaaaattactcgccgctcttaccaacattttatgaattcgtatggaaaaaagcatgttaaagatacggtctataagactaacggaacaatacgaacttgtgtaaaagacgcaatgagtgaaggattagttaaaattaattttactgagcgcattaatcttacatggaatgaggaacgttcaagaaaaattgaatatttaaactttaaagaggttcaaaaactaaaaaaatcacttttaaaagatattactccctcttatatcagtcgttatatgctactaacaataatttatactggaatgcgtccaggtgaaattaaggtgttaacatggcatgatatcgacttcaagaatcacactattagtatctctaaatcgtgggactatgataataataaaataatcaattatgattctgacgacataaataaagaaacgaaaaataagtcatctactagaatcatcaaggtagatcaaaatttattgaatattttagatcaactaaaggttaatcatcatgaacgactattcatcggaaaggatggaactattccttcatcaaatgctgtaaacaaagttcttagaaaacaactggcaaaaaataagattaaaaaagatggttttcattttcacagtttgaggcatactcatgtagcaatgttactatttaagggagttgacttatactcgataagtaaacgactaggacattcaaacatgagtattacagctaatacttacgcttatatgctagacgaattaaaacaacaatctgatcaacaaatagtaaacattttagatcaaatttaattaaatggataccttttagatacctctacaaaacaaaaaccgctctagaacaacatctagaacggttatctatggagatgaggggaattgaacccctgtccaaacgcatctcgtcactgacctctacgatcatagttatattacttgaacttcactagctcaaaacgccatataacagggctagaatgggctagctaacctgttaagactctttttaactattcaggtgaggtagttaaacgtaactcgctaaagttgatactcggtgtcagccacgagtaaaccgacaaggagcaacacatgcgcttaaattaagcagctaatgcgtaagaatttttgttatttgcagttatatttaactgtaacgtttttacgtagtcgtaacctacgaaccgcagtcaatgcgggtctacgcctgtcgaatcccaaaacatccccttgagatacttattcattatagcatagacacacattacatgcgataaaaatgcttaatcaatattagtcaaacgtaccacatcacgttcaatcatcaattcttcattagttgggataaccattcctgcaactttggaatctgtttttgtgattagtccttcactaacactttcattagcttcattatctacaacaacacccatatatgcgaaagcgtcaagaaccgcttttctcacaccagtatcatgttcaccaataccagcagtaaagataattgcatcaacgccgcccatttcggcaatataagcaccaacgtagcgaataatacgattaatgaaaatttttcttgctaacttagcccgttcgctatcactttcacgcacatcgcgcatatctggtgaaattcctgacaagcccaacaaaccagacttattattcatgatataaatcatttcatccatcgacttatgctctaccttcattagatgttgcacgagtgaaggatcgatatcaccggttctagtagccattgtaattccggcaattggactaaagcccattgaggtatcgtaagacttgccatccttaactgcagtaattgatgcgcctgatcccaagtgacagatgactaactttaagtcttttaaatctttacctagtaatttagcagcacgcggtgctgtatagcgaattgaagtaccatgagcaccatatttacgtacaccatatttttcataatattcataaggaagtgaatacaaataatgtactggatcaagattacggtgataagtagtatcaaaaaccgcaacttctggcacatttggtaaaacattcataaaagcttcaattccgcgagcctcagcaggattgtgaagcggagcataatctgacaattcgtaaatcttaggcagattttccttagtaataatagtagaatccttaaagtactctccaccattaacaacacgatgtcctacaccgacaatttcagttagttcttcaacaacatggtatccttttaaaaacttgatcaataagctaactgcagcttcttgatctgggatttcagttttttcaacgtgcttagtaccatcagctaacttaatctcaaatgatgaatcttcaagacctacacgatcagccattcctttggcaagaaccttttcatctggtaatgagaataatttgtacttaaaagatgaactaccagagttaattgccaaaacttttttcataaaaattaattcctcttctttcaaaaaaataagtgctttatcaattaatgattaatctttgcataccactcgttaagtttaacattaaattgaattaaagtctcttcttttttcaaggaaccaagtttggtaagcaaaacttcacttgctttggcctcatcaccgtgattttggaaaactaaaactgactttggattaaacttgttcttaaacatatcatctggcaactctacaatcgccttcaaatagactttcttagttaaccatggcataaaatcagcgccaatcttgcctgacaaaatagacttaggaactaccaaaaaggcatagccgttaggctttaaattattaataatttgttcgattaacaacaaatgagcaaaagaatgacctttcttagcctgattttcaaaattcttggcattctcatcaactggataatagcctacaggtaaatcacttacaattgcatcagtgttaggacacatccaaggcattaaagcgtcttgatgatataactcaatgtcaatattattcagatgcgcagccacatctgtcaaacttaacatatcttcatcgttatcaatccctaccaattgataattatccttagaatgattgagtgccttaagttgagaaataattgaaaacaacaaattccctgtacccacggcaggatcaacgatttccatcttttgatcttttaataatttatgcatcaacattgctactactgtagcaattgcaggtggagtaggcatttggttaacatcaaagccatcatcattaactgcctttaaagttagaaaagtaaagacttgagccttttctttttggctaatttcgtcataatctattgcttgatacttttgacttaattcagccactgttttttcatccggtgcaccattttcaaccttaatcttgccactttctaagttatcaaaagtctctactaaggcttctgtaaatgaaacatttaatgccgtttgcaaagtttgcacacagtctaaaaactgattaaaaagtttttccaaattttccatagcggtccctccataccttaattattttatagaaagggataaagaggtgcaaggaaagtcaatcatccgttaagcattcgataattaggcgattgttctccatgctagcatgataaatatcttgatacattttgataaacaaaagcgtggtcattaaaactaatacactacttagtaaggcactgccttttacgttatgcgtctttttctttggttttagcatttttcttttcctgttcctcatcaagctgaaaaactaaatctgatgcacccttatttttctctgttaccctaataatgatgctatctttagtggttttaaaagcagccttttcaacgttaaataataacggcatatagcctttccctgcaccagatactttaagtacgttctttttatagtattcaattcggtaagtagttgcatcgcctttttgatcgatgcacttaaaggaagcactattacttatagctaatttagttactggatacactgccttaattttgtcagcccgcataaaattttctagctgtacataagcataggctacttcattgacatgctgattttgattcaagtttgcttttttaacactcaacaataaattttgtaaaattagcagcaccatcatagtaataaaaagcgaaaacattgcttcagctaacataaaacctttactctttgaccgcaaaagtttgtttagtcgttgcatcccaaacatgattacgtcctgccttttgataaattcgatcgtgaactgttacttgctccaggtcagttttagtcagtatatggtaagcataagcacgatctgtttttaattccatctcacgaccatttttctgattttcagctacagttatataaaagcaactaacagcaatcacagcaattataattgctataaagctctcaattactagaaatcctttaacttttatcattccgctactctcccccacagcatttgatatttcaggcttttttccattccgtagccactaaaagtcaccgtacctggtttagaataaccagtcaggttgaatttaaaatgatccaagccagtaattttgatattttgatcaactggaatacttttgtgatattttccgccagagaataaaatttgattggatttagctagatatgatacgcaaatagtaacctccttgatcgtactgtacctcgaagtttgatcaagtgccgtcgtaactcttttaacagtattatcaaaaatcagtttttcttgatatctttttaactgcaaactaccaatcaacaaaatgccacagcaaacaccaagtgtaattattacttctagtagggaaaagccggctaatttatttcttttcaacgacttcgccactatctaacgtgaaattctttttagctttagtaatttgatcaccagttaagtaatcgtccttttttagatcttcaaaatctttaggttcaccatatttatccttatataactcaacttgcgtttgcacagtagtcctaaatgcatccgcagttttagtttcagcattcttcttttgattaatcaaattaggcacaattagcaaaatcaaaatcacgataatggcaattaccacaaccatttcaatcaaagtaaaaccctcttgcttgcggcgcttagccataatgtttgctaaatacttcttcatcttctctttcatttttaacttaatcctcttcttcactctatttttttacttttatctttaatgtcactttttctatagtccttgcatcattgaatacattggtaataacagcttcaaatacattccaataatgcataagccaattaaaataaaacaagctggttgaacattgacgactaatttctcaattttttcagttaaatccaaaaataggctacgtcctaataacaaacagcgcttactcaagctctttcgctcagagccagtctgcaataaaactaataaactattaggcaaaaaatcctctgcattaataatttcttctaaattttttccttcagctaaatcgtgccctatcttttgtcccagtgcttgctgcaatgaacctttctcttgatctgccgcatattcgcacattcgctgcaatgaaaagccactagctagcagcagtccaatgtcataaaccaacaaataatgaatatacagcataactacctgcccaattaacggatatttactcagttttttcattgatgaataatcctgtttattgagcaaagtaacgatcttagcaaaaaaatataagcccagcaatacaataatgatcagaccaatcatgaccatatctcctgaatgatcactgctatcgctgaattgtgtcgaaataaacgattgcataaagaccagtaaaatcaccatcattatcgctaaaaccaacggataagataattcagcccgcagttttttcatctgctcctgttttagtcgattcaacgttgctaaatgctgcaaacattcaactaggtttccttgctgtaaagccaaattaacctgagttactgtcgttttagaaaagcctagtttaagcagttcagtactaaaacttgctccttctttcatgcgactagccattctttccatcaactgacacctttttggccacaatgccggcattaattcaattgaattgagcaaagaaaaaccattatctaaactatgttttaaataatccaaaaaggccaattgttcttcgccatttaacttatcctttttggaattgccaatatacttcatgattaatttctcctcctttccacaaacgctctagattttcctgccaattaacgaattcaccacgaaccgatttgcctagctctttttttagcaaagaatctgctgcaatatccatcaagcactttaattttccttgactgactaataatcgctgatacgacactgcagttagacaatttgtcagttcgtcacacctaatacctaatccctctagtcgagaaatagtttgcaaagtacttttagcatgaactgtcgcaaaaaccaggtgtccacttaaagctgcatcaactgctaaacgtgctgttccttgatcacgaatttctccaataattaaaatatctggacgatgccgtaatgccgcctttaacaggttttggtaatcaattcccgcttcgttattgacttgtgcttgcaaaaaagaagactcatgaatttcaacaggatcctcgattgtcatcactactttgttttggctcattttcttagcaatttcatacattgtcgttgtcttgcccgagccagttggaccactagtaataatcaatccgcgactcttagccagcttttcaattgttcccagctgctctggaataaaatattgactatggtcaatcccatagatgactcgaataaccagtgactcttgatcggaaaaatctcctaagctagataaacgcaagaaatattcatgtccttcattctcatatgtcattgcgccaacctgcgggcgacgatgttctgcaatatccatctgagcactgtacttaaaaaaattgataatttcctttcccgtctccaaagtaaaacctgcatattcaattagacccttaccggtccgaaatttaaccatcaagttttcttttttcgggaaaaagaaaatatcacttgctttaactttaattgcctcaatcaataattcactgacaatttctttgatcttcataaaaatcctccttttttgcctcacattatttattacgcaaaaaaaaatcgatttttttgtgagaaatttaaaaaaacacaaaaaattttctcaactctaaaaaacgttgatctaacagcatttcaagattaaaaaaccattaaaaaagtacacaaaaaaaatagcttagccattggctaagctatttcatcattaactaattaatcttcatcagccgctgcagtataaacattttgaacatcgtcactatcttcaagagcatcaactaaatgttcaaattgttccttcttatctgctggaactggagtggtgttttgtggaatcatagttaattcagcatctgctagtttgtaaccatccttaattaaggcgtcacgtacacctgcaaattgctttggatcagtgtagatttcgtatgcatcatcactagtttgaagatcgtcaccaccagcatccataacatcaagtaatacttgatcttcatcagcatcagtagttgaacgatcaattacaatgtagcctttacggtcaaacatgtaagcaactgaaccagtagcaccaagtgaaccaccgttacgagtgaaagcaacacgaacgtccgaagctgtacggttcttgttatcagtcaaagcttcaacaaagactgcaacaccacctggagcataaccttcgtaagtaatttcgtcgtagtgttcttctgaaccaccttcggccttcttgatggcacgcttgatgttatccttaggcatgttgtttgaacgtgccttatcaattaccatacgtaatgtaggattcccatcaggatcaggaccaccactctttgcagccatataaatttcacgagataacttttggaaaattttacctctctttgcgtcttgcgcattcttgcggccttgaatattgtgccattttgaatgtcctgacataaggatccttctttcttttttctaatattaattaacgatattatcttaactcacagcacctcaaaattcaatggtgtcaaccatttaaacttgttttttctggtcaaaaaatctgtgtttaataaacaatactagcattatcagcaaaattgccgttaatgctcctgctccatcaagcattacatcatgcacgctcggtgttctatcacctgttaaaaattgatgatattcatcaaatacagcaaatgcaattgccataaaccaagttaaaactggtgctacccatttgattttgaaaattcttcttaatcctaaatagccaaaaccacctagtaaaaaataagaaccaaagtgagccattttacgtaaaacaaattgggccagccctgctcgaccatcaacttgcacattgtgaatacgaccaccgtaagtaaaatcccagccagcaacgatattctctaaccagccaaaataacggttaattttattgtcatgaatttcctgctgttgataagtcattgaactagaaatgaacaatgcaactagcaccaataaagcaagcagtaaaaagattttttctcgtttagtaaaatgaaatttatccattgctatttcttctctcttttttacttcttactttaacaaaaaacgggttaaacttgacccgttttataaattatttaactttgcttaatgcttcatcaattggtgtgtccccatcatgcataataattacttgatgaatcgtattatcatactttaggctatcaaccaatacctgagcaacatcatcaatcgaattttctccaccttctggagtaaatgatgtcttacccgttgctggcttctccattaagttacctggttgaatgatcgtataatccaaattagtattatgaattaaccattcatcagaaaagtacttagcaatatcataatcaataatgcttgcaagagaaggaatttctgcccacttgtcttggtcaagcgcaaaggcggagcttagttgaacgtaacgcttaacgccattagcttcagcagccttcatcagcttaactgcgccatttaagtcagtttgcaataagtcctttccacgagaacctgctacaaaaatcactgcatctgggtgacctaattcttcggtcagcttattaagcgaatcatgaaaatccaaatgttgcacccgcatattaggagaaataatttcaacagtattttctcttcttgcacctgcaattacttcatagccttcatctatcaatcttttgattacttctttgctcactctgcctgtagcaccagctacaaaaactttcattgtttttcctttctaccagctagccttcttaacacctggaagttgacccttatgagctaattcacgcatacattctcggcataagccaaacttccgataaactgaatgcggtcggccgcaacgttcacagcgcgtgtattgtctagttgaaaattttgtttcttttttgttacgaataatttgtgatgtttttgccataaatacctcttatctgcgtctatttattctttgaggcgctggctttcttttgctagttaatagtcccaacgccaaaataataattccaattgccaatacttgtccagtcattaacatccccacctttctttttgactcttactttttgttggtgtattatacatgcttacctataataagtaaagagatttgattgtaaatagaaagcgttttacactagtctgatacattccctgtcaagtagacagtagaattacataaagcttttattcctcagttgattaataatcagctgaggattttttggcttctcttattttcttttcgtgtattttttgccagtatttctcaattcgatgatttggtgcaatagggcaattcttaatattgcctttcatcgcttctttgcgcctttcaccagcagttaaaccgttaaaacgtttctgtggatcttcattaatgtagtaatctattgtcttacaaatagaatcattaagttcatcataactggccacttgaggatgaagaataactcgcatttctttgataatgccttgccagccttccattggaccattatcaatacagcagccaacacgagacattgattgcgtcatgccttggtcttttaattggttttggaaaggtgcgcgagtaaattgaaaaccacgatcactatggaaaagcggatgagcattagggtatgctttaacagcctgcttataggctgcttgaactaaagcagtatcgtttcgtttactaattgcgtagccaacaggatagcgatcatatagatcaaacacagtacatagatatgccttaggcaggttagcagcaacgacttcagtgatatctgtacaccatttttcattaggtctagatgcattaaagtctctttttaacttgttttcggccgttttctcaggcgttgtatgcttgaactttagcttctggtatctaggcttttgtgatctaatgccattgatacacatcaagcggtaaacagttttatgataaaccggcttttcatcagacatctgtcgattaactgccatggtcatcttttccgtcccaaacagactgttgttagacttggttatttcaatgatctttgcttcaatctttttgtctcgttcttcacgcttactcggcttgcgcttaggatcaaagtatttgtaataagctgagcgtgctattttagcccatttgcacattaaatcaatcttccaattgtacttttgatggcagtcatggattaactgatatgtttcttgtttccagcgtctttttattgcggcttgtctgtatcttggttgtccggcaagcacatcctttctaactgatctaatttttttaggaattcgttcttagtttgttcttctttgagctgacgctctaattccttaatttttcgattagccagttctaactcagttagctcttctggcttcttatgtctgcctcgtttatctgttaatcctgtttcaccattagctagatatttgtgtgtccagctgtaaacctgctggtaagaacaatcaaatttgacagctgtttgagtgtaattcttgtcgtgattaagacagtattgaacaatctgaattctttcttgctgggtagtttttcttcttgctttagtcatatagacctccggatggggatcatagtcccgattttctatatgactattatacttggaaacccattctgatactgttccattgcttctaatgccatatttattagctaaagaaggtaacgacattttgccagctaaatattcttgaacaaccttttctttaaatgccttagagtaatgattattgtattgagcattacttagaagggtatcacgattgctttgatattgatgaacccatcttcttacttgcatcgctccacttttacttggcatcttaagccgtttagctatttcaacgctgctcctattaccattcaagtattgttcaactgcccatatcttttgatcgaatgaatatttactttttctggacataaaaaatcccacctccatggataattgaatactttatgtatttaaatcgtccactttagtgggattgtatcagtcacagttctttttaataggtaaaatttatttgaatactttcatctaagaaaggaatagaatgaacgaaaaatgtaaaaataagtcgccaggattcttatctttttagggagtaattatttttaaatagagaaggatgagaattaattggacgatttaacatcaacaaataaaatgaaagccatcacttggcctgttttgaccttgatggcactttgtactgttatcggcttggacgatatcatgtacaacttccaaaaccaagggatgccagttatcacctcttggattatcatgtgtttgctttatgtaacaccttactcattaatggtaggacaattaggttctacgtttagtgaagaaggtggcggactttcatcatgggtccgcggtactgacggagaatttttaggttacttcactgcttggacatactgggcagcctcaattccttatgctgtagactccgctaacgaaatcattgtcgacctaggttgggcattgaccggttcaaagggattccaagataaaattcctactaccatgtttgctgctttgactttcgttgtgttcattgttttcattatcgttgaacaccactttgccaactcaatggaattcctttccagtattggtggtggtttgatggtcattatgactgtcttgtttgttttccttgcctttgttggtttggcaaaatcaggcggtcacatggctacccaaccatttacttggcacacaatcattcctaaattcgacttgcactactggtcaaccgtcggaatgttaatctatgccatgaatgggtgtgaactggttgcaccatatgtaactaagatgaagaaacctaagtcagacttccctaaggcaatgattactttagctatcatgactgctttcttaactatccttggttcatttgcacttggtatctactttgacgcataccacattccaaacgacttgaagatgaacggtgcttactacgtattcgacatggttggtaaacaattcggtatgggtaaattcttgctttacctctgggcttggacatcattattgttcaactgtgccttggttgccgtattgcttgatgccatgactagaatgcttatctccgacactggcgataagtacatgcctaagttcttacgtaagaaggacaaaaacggcttaccaattaacggttacatcttaactgttgccctttcatcattcatcatgatcttaggtatcttcttacctgacatgaacgatatcttcaactggttgcttaacttgaactcaatcatttcaccaggtgttacctgctggatcttctactcattcatgagagtaagaaagaactcaaagaagtacccatcaaaatatgtctacattaaaaacgataaacttgcttggcttgttggtcttgccttgttagttgttactgccgtagcaaccatccttggttttgcaccacaagatgttaagcaaggcagtggcctttggtggtacgaattgatcattaatattgtagccgtaattgtcttaattggtttgggtgcaattttacctggaattagacgtcgtgaagaagaatacggtattgcttttgacaaatctcaatggatttggatgggaattatcattatcggttctattattcttgacgtatggctttaccaagattccagcaagaatcacaatgattatagttgaagctatcgctgcattaatcattacttggattgttggacgaagaaaaccccaacaagcaaccatataaaaactaaattacaaaaaagctcgcaaataatgtcattaattatggcatgctttacgagcttcttttttgctcaaattgatatcactttcactctatattctataatcatatagtaatttacaattattttgtaattttatatactcaacaaggttagcactaagtgttatactaaagtataatggagataaggcatatatttatagaattatttaaactgagactgaataaaatgaaaaatataagaaagaagattatagtatttctgctagccttggaatgcttagctttttgtatatcctttaatagcaaagtgtatgcatcatggagtcccgcttcagaatggaaagaaaatggctatcctactgaggactggacaacagatcaatttacataccatcaaatagatttattaatgatcctaaaaataatcaattgttgttatatgtagacatttgccctgattctaaaaccaatagaaatagtcatggatatgaaggtggatatcgtcaattgcagccatcagcctacaatataaatgttggtaatgctacatacagtgttaatttagatgtcaatccatggaatattcaaaatggaaaatctggatatgcaggaattggagtatgggatcctcaaactaatcaatataaagcaactaaagataatctctgtcattattatgcagatagtgatggccgccaatcggccataattaagattccttacaatatgtttaacagagatgacctaaacggatcaactaaaatgacaatgcaaaatcctaatttgggtggcaacacaaaaatcacaatcagcggagccagcaccggcccatacatccctgccatcatcgcttttgtcttagcttcaatagccgcaattagttattaccataaaagaaagttagtacgtcatgaacatcagtaaaatatccccaaaaatatttcattttggaaatggtgtcatccgtgcctttttctttggcttgattataattagcttcttcgctgtgctctcatctactaattggctgccagatgcaaaaactacgaccggcttaacttacataatgtttgcactactattaattttagttttaagctggttctcctttccaaagtttcaaatgttcttaaaaacaatttttatcaagcataaatggattacttctattatttgtttagtccttgcattaatttggcaaattcaatttgtctacttcgtacatcccgcaatcggatttgatgttagtgctgttcacaataccataatcaatccgaatctacctgaattaagaggatatttcagtgttaactacaacaacctatccatcctccttactctaagacaagttgccaatatctttcattcaaccagttggttaacaatggctttatgttcaacacttgttacagatttaagtgttttagtaatcatcgctacaattgcgataatcaattttcaaaaaattcccaatatcatttatattctagctagtctgcttagcatattccctatttgcatggttccttacacagatgtatggtgcttgctccctatttcactttcaatttttggctggagcatcgctacccaaaaatcatatctagttgtcattcgttttttaggagcaattttatccggaattagcttagcatgtggcgtttggatcaagccttcagttgctgtttggggtattgccgcgattttaacgagtttactctatattttaaaaaacaacaaagtaattctaacttctattttctgtttaactattgcagcaagttttgttttagcctatcaacctcttaaaaaagcggttcaagatcagcattacatcatcgttaatcaaaaacgccaaattccgatgatccacttcatcaacgttggtttaacacatgatggtgcctatgatccaaaagcagctttaaaaatggatgagcttcctactaagaaacaaaaagttgtctattctaaaaagatgatcatcaagcgtcttaaaaaacgcggtccattgggttatttacaatttctagttaaaaagcaaggtctaaatactgcagatggtacattcggctggctgcatgaaggccattttattatttccaagcagccatcagaaggctggcgaggattcttagcggaatttatctatccaaatggaaaatatgttattgagtttagatttatcgctcaaattctttggacaattattatttttgtattgctattcagttttcaaaaaggcggctttattattcaaacgctaagaatggcactagttggcggttttatattcttacttctttttgaaggcggacgtagtcgttatctagttcaattcttacctattatcttgattttaacagcactttcagcagacactgctaaatataatttagataaaattttgacagcaattctaccgaaaagaggtttttaaatatgaatcttagtttaatttaccctactatctctttaccaatcattacaattagcatggttgtaactcaaacacaaatagaaaaagtatgggagaaacagctagaagactggcgtcaccatttatttatcatattgtgttttactactttttacatactccaaactgtttgtattgcaaatgtaaccatctttacctttaaagcaattgcttatatgtatgtcattccaacaattatggtattacgcaacaagcaacatatttggtggtttttgctttttatcacaccactaattccgttacttattggtcttgatttaaagagatattcatttataaatatccccgctactttattgcagatttcatccatcgcattaatctgctttattctaaatcattgtcaaaatctttcatatcaagttaagtatatcattgccctttattcagggagtctcatccattttgtacgtctttatatagaaaatgaattacacctcacatttttaatcgctttgacaatcggaactactttcaccatcattggtgaaagctggcgttattattttgaaagtcgacatgaagaagcaattgctaaattgcattacgaaagcaagcgtgatgaattaactggtcttcttaactttcgcgcttttgaccaagaaatgaaaaatttatctaaaagacctaatataactaatacctatattggcgctattgatatcgatcattttaaagtaatcaatgatacctatggtcacttaaatggtaatattgttctgcatactttttctaaaaaactgaaacacgagattgataaagcttttgctcctaattgtttcgtttaccgctttggcggtgacgaattttcaattgtcatttttaatgctaatcctgaacaaatcatcgctgcactaaacaatgttgaacaatatttccgcgataattttatcaaacttcctgataataaaactaaaataaagttctcgttttcatgtggcttcacgaagcatttatctaatgaacatttttataacactcttgaacgcgcagatgatttagtttacaaagtaaaaaataatggccgcggaaaaatattgactgattaaaaaactaaggaaatgaataatgcttaatggatatttaattggcgggattatagtttggttatatgccctttcagtaactaatcgtgcacatttatttgctttttattattgggttggtgctattggtgcttttcttttaactacttttgcatgccacaaatattttgtctggttcctagctagcctagtgagccgcggagctggtgtgattggacagctgactcatagctttactgcttatccgtttccagctgctttagacattcaaactacttttggatcaattaccctattagttgactatgaatgttctggaattattgaaacattggcatatttaagcttattaattttctttcctatttacactcgtcgtcaaaaggttgctcttagcattatcggtgttttttggatctactttattaatatttgccgattaggtttaattgggataaccgttcattaccttaatttgcgaaccctgttctgggttcacgacgttataggacgtatctttttctatatctttacaattcttctatattatcaagtcttcactcattcacaattagtctcaaacttactagggcgaagcaaattagattaaaaaggaataatcatgtttgatcaaacagtattacaaatgggattctgggctacttggcttttaattcctgtcatatttgaagaaattccgatgataattaattttattcggcttcttcatcatcataaaattcgcaaaaaaacccctctgccagattttttgccagtattatcaattattattccgacttataattcatccaaaacactttatagatgccttaaatcgctagctgattcagattatcccaaaaatttactaggaattttcgttgtcgataatggcagcaaagatgacacctttcaagtctttgctaaagctcaaacggactatccacaattattgatgcggtggcttacttctcctcatggaaagtcttctgcattaaatgcagccatttataaagcaagatcccaatatatcattaatatcgatagtgacggtcggttggataaacatgctttaaacaacattgttaaaaaattctcggctaatccaaatatcgatgctttaactggaacaattttaactgatcgtcatttaacttcaaaagccgcacaagcttttgaagttaaatgaatattttgaatattgccaaacctttctagcaggaagaaatattgaaaataacagcaatcatattttcacgctttctggtgccttttcggcttttaaacgcgagaccttaattagaacgtatctttacagtaccgatacaattagtgaagatactgacatgactttccaaatccggtacaatttaaagggaacgatttcattttgtgatgatgcaattttttattctgaaccaattagcggcttcagtgaactatatactcagcgacaacgctggcaacgcggtgaactagaagtcattaacaaatatttatcgcaagttttatcttggaaacaattcttcagtaattttcaaattcgtcgtttaatcattgatcacacagtcactttcctaaaaataatttggatgtttgctatttttatattattaggatttggctattcatggatatcattattgttttcttatgcggtaatttatcttttatatttatttttggagatttcgagttcaatttgtgtttacatatacttaggaagctttccagaagaaagaaaattttatcttaaaaatatttggatgatttttttactgcttttttataatttactttgttctttcattcgttgtgttgggattattaatgcttcaaccaccactacaacttggcaaggaattaatataattcaagaaggtcaacaggttaaccaaatcataaaaaaagatataagacaattattgaaaagaaaaaattatgacgactaaatatcatacttatatattcacaacttatttgaacgcatcacatgctattcgttggagtaaaggaatcgggcaggctcattcccatacttatgaaataaggtatagctttcatattaataacggcaaattgattcgtttcaatgaaattgaaaataagattgctgaaattataaaaaagtttaataatcaatttttaaatgaagttgagccattcaccaaagtaaatcctactttagaaaatttaaccgattatctattcaatcgtttcggcgaagaattaaataaattgaattgtagtttagatgaaatatctgtaagtgaatcaccaatgagaacttatcagatttcaattaggtaacagaggtaatagtaatgagtaagtggtataacgtttttcaacctatttatcaagtcgataaagatttaaatgtaacaatttcacattatgaaatgttattacgagatgaaaatgattccttcccaaataacgatttcttcagagtaattggaactgaagaagaaaatcaaaaatggattttagccgaaaaagagtcaatagatcaagcttttgctaagtaccctgatatctgtatcaatttaaacattgagcctattcaattcgcatacccaagcgtttggaaatttattgaaaatatttatagtaagtatggtaaaaaagtggtcattgaagtaactgaacgtcaacttcaagctggaaccttaggtaataaacaatttgataaatctttccaaagattccatgatattggcttggacgttgttttagacgatgttgattctggtggtcatagctttacttttgtagatcaccattctgatataatcagtgggatcaaattatcattactagacttcgatcctattagttctgatactactattaaatttattgatgcttgggctagctttgctaaggaaaaacacttagatctagttgtagaagctatcagaaataaggaaattgctcaaaaatttgctggtaataaacatattttccagcaaggttattactggcaacagggagtaaaactagaagacttaccaacggtttatggatttaagaagtaattacaaaaagacagaattgattgcttaattctgtctttttttacatgtatttatttaaaaatttgtttattcgcattttatattcatgcggataagtttcgaatgaacgcgcatgagctgcacttttggcaatccataactccttaggaccatttgtagcatgatagttttgatacaccattttagttggcacaaaattatcttttccaccatggataaatagcattggcttagtattcttttttaattgcttaactgcagatgcatcccctaaataaaagccaagatttgctttacttacaccgcttaatagcgtaactgcacttgtagctactgcttgcggcataccgtataaatcttttgcttcatgcatgaattcagctttcacatcactatacccacagtcttcaatatatgccttaacttgcttaggcatcttgaggccactagtcatcattgttgttgctccgcccatactgacgccaaaaattacaatctgttgttttcttccttcaattgataaatctttattgacccattttctaacgtcatatttttcaggccaaccatagccaatatacttcccttgactttgtccatgagcacgcgcatcaggaatcaaaacattatatcccaattgatgaaacatcgccgcatagggtgccatggtatttttattattaccaaatccatgcagcaacacagcagtcttttcagaatgcttatttggaatataatttgcatctaagcggtagtttgaagaagcagacttaatataccaatgctcttttttagcgtttttataccactttttattctgcgcaagtgaatctttctttttcttgctagaatatttattcagcactgtcttttcacctggaacaaaagcaacattaaagaaatatgcttcaactgctccaattaaaacgattaaaactgtggcgactatccctattatccaccatacttttttgcgttttctattcaaaatgtcaactcctatataaaataatatagaattaattatacacttttgaattttatatggtatattgacattttaagtaaaatattgcctatacaaaaaatgatggcttacgccatcattttttgttattaatctaaatcttcaccgtgagattcaattaccttcttgtatcagtaaaatgaatccttaggcattctcttaagagtacctttaccttcatcatcacgatcaacatagataaaaccgtaacgcttagacatttgaccggtaccagctgatacttcatcaatacagccccaagtagtgtaggcacggacatcaacgccatcttcgatcgcacgattcattgccttaatgtgcattctaaggtaatcaatgcggtaatcgtcatgaatcttaccatcatcactaatcttatcaacggcacctagaccattttcaactaccatcattgggatttcgtaacggtcatacataacttcaaggtagtattgcaagccatctggatcagttgcccaaccccattctgaatacttaaggtatggattcttagcaccagcggcgaagttaccgccaaccttatcttttacttcatgagttgtgataacgttgctcatgtagtaagaaaaggtgtacatatcaactttaccttccaacatatccttcttatcttgctcagtaatgtctaagtgaacattgtgttctttccaaagacgcttagcaaatgttggatacttacccttgcattgtgcatccccacagtagaaaatattttgttcccacatatggcggttagtcaaaatatcctttggatctggggttaatgggtaatcaacgattccacaaatcatattccctaccacataatcaggatcaatttcatgagccaacttaactgcccgagcactagctacgaattgatagtgcaatttctgatatgcatgttggtatgccttatcatcagtcacattattgccaaaagcactaagcatcaacagggttgaattgatttcgttaaaagtaagccagtacttaactaatcccttgtattcttcaaacaaagtcttagcatatttcacatacatatcgatcattttacgatcttgccagtcatgatatttttcactgaggtaaagtggatcttcatagtgagaaatagtaactaaaggttcaatatcatattttttacattcttcaaatactctgcgataaaagtcaagtccagcttgatttggcttttcctcatcacccttagggaagatccgagtccaagcaattgataaacggaaggttttgaaacccatgtccgcaaacatcttaatatcatctttgtaatggtgataaaaatcaatcgctacatggttaggataatattcattaggatcaattgcaccaactgccccttcaggaagtcccgcacctggaactcctggtgttttttctaacttaccatttaacttgtaagtcaacattctaggtgcatctaagctacctgcagtagtaatatctgttactgataggcctttaccatcttcatcatatgcaccttcgatttggttagcggcagttgctccgccccataaaaagttctttggaaatgacattatgattctccttttctgaaagcatttacattaattatagactaattggtttgaacttgaccagttgttttaacttctgcgttactgccttgcaaagacaaaatttcttgaccaactttaacttcaccttgagctacttgctgtacagattcatatttcttagaattcgtaacaacaactggagtagtcacttcatagccagcagccttaatttctttaatattaaatttaaccaatggatcacctgctttaacctcttgacctttttctactaaagtcttgaagcccttaccttgcagattaacggtatccattccaatgtgcattaacacttctgcgccatctgtagtgttaagtccgacagcgtgtcctgttgggaaaactaaagcaatcttaccatcagctggggcatgaagcacaccttcgcttggttcaatagcaacgccttcccccattgcaccgcttgagaatacttcatctttaatttctgacaatggttttacttcaccgtctaatggtgaaactaatttggttgaaggattttccttttcttcacttaaaattgcttgtacaggagcactcttagtaatattagctgcttcattagcggcgtcagcaactttttgtgcttgttttttattatattcagcatcaactgattttttaccaaagagcatttgaagtgcaaaaccagctataaatgctacaataccggcaataattacgccgacaattgttgtcattgatcctcccttaggattaatgtaggccggaattgcaaagaatcccattgatggcataatgtacaatactgaatgaaaggcaccaatgattgcacctgagactgcaccagcaatacagcttaaaacaaatggcgtttttcttggtaatgtaataccataaattgctggttcagtaacaccgaacagtcctgagaaaaatgcaccagtagctgtttctttaagttttttgtccttagtttgacggataatagctaaaacaacaccaatttgcgcataacaaaccatgcaggataaacctagaattgggtcataacctaatgcggctaaatctgcagtagttacggcaacgattccccagtgaacaccgaaaataacaagtacttgccaaagagcacccattaataaaccagcaataattggactaaagttgtaaacacctgacatcactgcaccaattgcgtccccaacccaagtcattacaggaccaattactataaatgcaactggtaaagcaataatcatagtgacaactggaaccaagaacatttgcacaactgatggaatccactttttagcccagtgctcaataattgaagcaaaccaaacggtaaataatactggtaaaactgtagaagtataattcatcgtgataaccggaatgccaaagaaagtcgtgtgaatctctgaggcaaaagccgttcctttaaacaatgtacctagaacagtcttacttgcagctaattgaaccatagttggataagttaaggttgcaccaattgctaatccgataaattgattcatgtgaaatctacgtgctgcagttacccctaagaatactggtaagaagtagaaaatactatcaccaattgcatatagaatttggtaagtacccgatttagtagaaagccatcccattgcgcctactaaaactactaggcctttaataataccgccagcactaagtggagctagaatatctgtaaaaatgcctgaaatcaaagcaacggctttatccacaaagctagaattatcttcaacgtcatcatcaggaacttgtccaccgccattaaagccgccttctttgacaacagcatcgtaaacatcagcaacttcattaccaatgaccacttgatactgaccaccagctttaacaacagttacaacaccatctgtatcttttaaaacatcatcgttagcctttttttcatcctttaatttaaaacgcaaacgagttgcacagtgaacaacactggtcacattatctttgccaccaacattttgaatgatggtcttggctaattcatcatagttcttagccatttgcctttcctccttaaaataaaaacccaagctactcaaaaactaaagaacataaatgttcaacgtctttcagtaactcgggttcatgcctaatcttcttagtaacatacctaagtaacttagatatttaattatcttgacgactagttacgcgccaaatatgtaaaaaaagataaaattcatcatctgaatctaaatcccatcccatttttgcatgtaagtaagtggtgatccgctccgccgtctcatacgctttgctatatttgattttcataaaacctagcattgcaggatcaagtgaagcctcctccttttgcttatttcgtaaaaatctaactaacaaaatgcgcaaatgcgaaacaaacctactatagttaaaggagctcgtatcaagttgcattgaatattgcaattgaataatatcgattatcccacgaatcaaatttgtaatctgaattgtttcttgtacttgagaaacatcactcttagcattaaccaggtgataggtcatcaaaaccgactcactctgcggcaatttaatctgcatctcctgattaattagattgaccacttttttagctgccgcaaattcttttggaaaaagattttgaacttcccaactattgttagcgggagctatatcaatatgatctttaattcgcgtaactgcaaaatcaatgtgatctgctaaagcaagatactgaaagtcattgaacttaatctgaagcagaggttcgaccagctgaagtaccttattagttacttcaattgttttagggtcaaagcccttaacttgatccacttcgtctttagtaacgaagcgacgttcaattttgctttcatcaacaggatcacttttttttagaccaaatcctacgcccttgcctaggactatttcttcttgaccttggttattttcaattaaggcagcactattattaaatgttttaagaaatttcataataattcaccaccttagcaaaaaaagaaaaagctatcacaaataatgatataccaacgcaacattatttgtaatagctaagacctgatcgtatcagtaatccgctcacttacagttattataatagccaatattgtaagcggtgtcaatataattttgtgaaaaaaagcaaaatattttacaatgaactaaaaagcgaggtaattaaaatgaaattcgttcttgcacctgattcatttaaagaaagcatgacagcaaaagaagtctgcattgcaatgaaaaatggtattcaaaaagttattcccaatgcacaaataattgcggtaccaatggccgatgggggcgaaggtacaactgattcactcgttgatgctacaaacggtcgaaaataccaaataaatgttaccggtccgcttaatcaaaaagtatcagcttattatggcatctcaggtgatggacaaactgcaatcatcgaaatggcacaagctagtggtctctcctatgttgcaaaaagtaaacgaactcccgaaacaattttaaagactacaacttatggaaccggcgaattaattaacgcagctttgaagcacaacgtcaaaaagattattatcggccttggtggtagcagtactaatgatggcggtgctggtatggcacaagcgcttggtgttaaattttttgatcaaaatcatcatgaaatcacccaaaagttagcaggcggtgctttagatcaaattgctaatattgatctttcttcaattaatcctcgtattaaagataccaaatttttattagccagtgacgtaaccaatcctctaactggacctaatggtgcaagtagcgtcttcggcccacaaaaaggcgcagatgatacaactgttaaaattctagatcaaaatttatctcactatgcacaagtaattgagcagactattgataaaaacgtcgcccaaatttctggtagtggtgctgctggcggcctaggcgctggcctgatcgcctttactaacgccagtattcatccaggcgtgcaattaattgcccaagaaactaagcttgaagccaagatcaaagacgctgactatgtttttaccggcgaaggcggaactgattttcaaactaagtttggtaaaacaccctttggtgttgctaaaattgctaaaaaatatcacattcctgttatttctttagcaggctatttagatcaaggtattgatcaactctatgatgaaggatttaccgctatatttggcattcttgctaaagcagaagatattgagcaagccctaaaagatggaccaataaatgttacccgtacaactgaaaatattgttcgtttaatcgcacaaaaataagatgagctcgatgcccatcttattttatttcgttaatttcttaattaagccttcacagccacgataaatttcattatacgctgtttcaaaatcatttgtataccaaggatcatcgacatcagcataagagccagcaaactctaaaattttatgttctttatgctctgggtctccaccagtaatgcgattcatatctgcgaaattttcttcatccatgcagattaaatattcataattatcatagtctgagcgagtcatttgactagcacgatgaccacgatcatatggaatatgttttgcaactaattcccgttgtgcacgagcatcaatcccatgacctaaagcatcctgcgtagttgctttagattcagcagtatattgatctgctaggttattttcttttaacaaatattgcatcacggcctctgccattggtgagcggcaaatattgccatgacaaacaaacagaatttttttcattaccttttcttcctcttagttagtctatttataaccggccaaataatcgccgtaataactccaactgttaagccaacccaaatctcctgcgacaaagttacaagaatgccactataaactcgactttgcaatgcggtcatcgcctcatttgaggcaagccacaatgccacaaatgaagcaatagtagctagtgctagtggaattgacgccgaagagcgaccaaataaaatcaaaattgcggctaacaaaaataacaaagccactgcaaaaattgaatactcataaattgtaataatatggttcacatcttctgaatcttccttcaatttatgattaatttgcttgactaaatattcattgataatttcttccaacttacttttactagttaagcctaaatctttagtggtcaattttccctgatcattatatttttcacacaatctatatagatcagcatatgataagttaacttgatatttcggcggcaattgttctaacaatgtcttttccaaaccagatgcttcgagtaactcaacccctgccttcaaattaggattatctgagtcatccactactcgattgattacttctttgcccatcgcctgtgtatcgtttatttttaaattcacattgctagtcattaataaccaaaaagatactgcggctaggccgaccattatcaaacgtagtattattttgacgatgttcttcatctaaaaatcttcccctaacatctacttttttcagatggcaaacaattgcaaggcaccatgtcaggagcatccttttctttcaatttaagttcttgctgcatcgtcttaatatcgcccttagaaagcggtgcttcttttagcaactgaattaatacctcacccttgtgcatatcacacatgttttgcatcatatgtaaagtaacttcagacatcattttgcgctgactaatagtcggcttataaacaaaacaccggccttctttacgcgtctttagcaagcccttttgcactaaacgccgcattagcgttttaattgtggaatcggaccaatcctttttaccttgtagttctttgattacttggccagtacgaacttctcctaaggtccaaataatacgcataacttcccattctgattgggtaatggaattacgatcgtctttagtttctgccataaaacatcacttctaaatccaaattttttactaaagaacaaattttttcaaagcctttgcaatcccgttgtgatcattatcatcagtaacataatcagccttatctttgatctcactaatggcgttacccatcgctactttcatgaagttgggattagaaaacatcgaaagatcattgccttgatcaccaaaaatcatcacgtctttttgggcaatttttagccgtgaagccaaatccattaaagcattaccttttgaagctcccaaggcatttaattcaataatactgtcaaaactgcgaacaatgtcataagtctgaaaagcccagtcggggaaactattccacagtttttctacctggtcagctccttcagttgaagtaaaaccgactttgttaaaagtaaaatcttttggaatttcttttcggtctctaactttcataatattatcggtcaaagccgcattaatttgcatttgcacagataaatcccgatcagttgtaatgaaatacttagtcgtctcaaaatgtacatttacatgacttaaacgctgaaaacgcaacatattattgaagtcttgataattcaattcctgactcattaaaacacgaccagaaattgtttgaattactgcaccattaaagacgattgcatattgatcatcaccttcaattcctaattgcttagcaaagttcaatactcctgataatggtcgtccagtagctaaaacaaccttaatcccattttgtactgcgacacgcaacattctttgcgtttctggcaaaatagtattattgcttgataataaagttccatctaaatcaaccgcgatcaatttaatagccattttaatccctcggatcttaaaaattacatctagcattaattatacaaaaagccgtgatttaactcacgactttttacttatcgattattcaattaggattttacttacccatttccttttcgaccactttaacgatacggtctacataggcatcagtttcttcttgagttggtccttcagccattactctaagcaagtcttgagtacctgatgtacgaacaagtacacgaccatttccagccatatccttttccactgcagcaatttcatcaagaattggttggtgttctttccagctcttcttgtcagcaaccggaacattaactaggcattgtgggtaatctttaaagtctttcaaaagttcacttaatgacttaccagtcttcttcattacgagcattaaatgcaaaccggttaacataccatcaccagtattatgataatcactcataataacgtgacctgattgttcgccacctagattgtagccgtgagcacgcatttcttcagaaacgtaacggtcaccaacttgggtacgaacattcttcaagccttctttttcaagagccttagtaaaaccaagattactcattacagtagtaacaatggtatctttcttcaaacgaccatgttctgccaagtatgagccgagtacgtacatgatgtggtcaccatcaacttcattaccattttcatcaacagcaatgcaacggtcagcatccccatcaaaggctaaaccaagttgagcaccttgcttaacaacttcttcttgtaacttttcagtatgcgttgcaccaacatgatcgttaatgttcaaaccatctgggtgagttgcaatagtagtaaagtcaacgccacaatcagcaaacagtcttgagatcaatgcgcttgaagcaccgttagctccatcaataactaccttaattccacccaagtcttctggaatagtattttcaataaattgcaagtatttagctgaaccttcgtggaagtcagttacagtacctaatcccttagcagatggacgaggtaatttatcttccttagcgtcaattaatttttcaatttcgccttccatttcatctgaaagcttcaaaccatcgctaccaaagaacttaatcccattatcttctacagggttgtgtgaagctgaaatttgcacccctgcatcggcgccttgtgctcgtactaagtatgaaagacctggagtagtaattacgccaacctcaagcacttcaatcccaactgaaagaaggcctgaaatcaaggcatattcaagcatttggcctgaaatacgagtatcacgagatactaataccttagcttgttcgccgtcttttttgttcttagttaaaacataaccaccatcacgacctaatttaaaagccatttctggagttaagccttgattagctacgccacgaacaccatcagttccgaaatattttaacatttaataaacaacctttctcaaattaattattcgcattctttactttaattgatatctgtacattttcaggatcaacgcgagcaactcccttaggtaaaactaaagggtaattctttacagttgaatatgagattcctttcagatctacatcaacatccaactgcttaatctttgctaatgtttccttttgtccatacagtgttacctcatcattcttggcagtaaccgaatagactttattatttttttcatttttaggctttaaatttagcttaactttctttttgaaaagcgatattggcaaactagcttttactgtagatggattaatcactgcatttaattgacgcccttttttatcttcagctatcaaaataacttgacgctcataatcatgattaatgccattaggtaaaggcaacttggcaacgatctgatcaatctgatttacttcgcttctagcaccagtaacctcaacttgctgcggatcaacactagccgtaccaatattatatccattagcaacagcatttttattatactctatttgaacgggcatggtacgagattttcgccgttcaatatcaacattaactgttgccgggttaatcgtgtaagataattgactatttagtcccgtaacttctacctttacggtttgcttacctattttcttatgagttagatcaatataagcacggaagctttgagtattaacagtcgaagtaaccaacgcattcgaaccctccaaagttatcttaaccttttcaggataaccaacaacatagtatttatctgtattaaccgaaacttgcagaggaacactaattgtctgcgtttcattagcagtttgccgtgtcttcttagattcaccctgtgtaacaaaacctgtttgagtagagtcaatgtaaaccactaataagatcgcaaacagcaatgagattattctgattacccagcgtttatcccaaaagtctttcatcgatctgcaccccatttccagactttattaatcacacgactaatccatggaaccttcttctcttccttaggaacaagttgagcattcaaatacttcaaatattcttcacgagacaaatctactaaaaagcgcccgtttctagtaatagttacgccaccagtttcctctgagacgacgatcgttaccgcatcggtaacttcagaaataccaacggcagctctgtgacgcgtgcctaaacgcttaggaatcatgctgttatctgacagtggtaaatatgctgctgcaacagcaattcgattattattgataattaccgcaccatcgtgcaacggcgtattagggataaaaatattaattaataattcaccagaaatatccgcatccagcttgattccagtttcaatataatcatctagccccgtatcttgttgaatcgtgattaaggcaccaattcttcttttagacatgtattgaatcgctttatcgagctcctgcaccatcttaaccgactgtgtatgagcactctcacctcggccattaaaaatcggcgtgcgtcctagccgctctagtccacgacgaatttccggctggaaaataacgataattccgattactgcccaagaaacaatttggtccacaatataagttaccgcatgcagttgcagtaagccggcaataattctaacaataaagataaagacgatcccttttgccagttgtactgctttggtaccacgaatcatcatgatcaaacggtaaactaaataccaaatgattaaaatatctaaagcaatggagaaattattccaagtaaacagattagaaatattaaaatgcattgattgctcctttcttctttaattataaccgccccaatttaccgtgcatacattttaaattctaaaaataggtcattatattcttgggtcttcttaggacctaaatctctaaagacctgtagattcttcaacgtactttgagtaggataaaactgccggtcatctctaacttttttcggcaataatttttgggctgcggtatttggggttgcatatccaacatattccgcattttgcgctgcatttttaggttcaagcataaaattaataaacttaagtgcagcttttttattttgtacagttttaggaataacaaaattatcaaaccacaaatttgatccttgcttaggcacaacataatgcaagtgaggattttgttccatcatttcataagcctcaccagaccaggtaacgccaattgctgcctcattttgcactaggtacatcttcatttcatctgaaataatcgccttaatattgggtcccagactattaagcttagtttgtgccaaatgtagtttaatactagatgtggtattcattgaatatcctaaagaaaccaatgccatccccattgcatccctagctgaatcaactagtaaaatttgcctgcgatactttttactccacaggtcattccaagtcttaattgcccctggcttgacgaatttatcattataaacaattcctagtgtcccccagaaatatggcacagaataatcattattttgatcaaatgacttatgtaaaaaactcttgccaatatatttcaaattaggaatttgcttttgatccaactgatcaagcaaatgagccttgcgcattttagttaccatatactcagaaggaatggtcaaatcatatgccgttccgccttgtttgattttggtatacatcgcttcattggaatcaaaggtctcatagacaacatgataacctgtctgcttttcaaacttttttattaactttggatctagatagtcgccccagttatagataatcaagttttgtttatttttcccggtagacgatttctccaaatgatgggataaaccccaaaggcctgcacaggcaattaaaatagctgcaattgccatcataatctttttcatttaactaggcctcccatcacacgatgatttttctttctgccctttttagtagtaataaaataatagattcctacaagcaacaagacaaaaatgaacattacggtacttaaagcattaatctcaagatcgattccttgtcgtgcccgagaataaatttcaactgaaagagttgaaaaaccattcccagtaacgaaaaaagttacggcaaaatcatctagtgaataggtcaacgccataaataaaccggaaaagatgcctggcataataactggaattaaaacatcactaaaaacctgccatgaattcgcccctaaatcacgtgctgcatcaataagcgacatatccatttcattaagtcgcggcaagaccatcaaaaccacaatcggaatagaaaaggcaatatgacttaacaatacagaaccaaaatttaagccaattcccaatgctgtaaaaaagatcaaaaaactagcaccaataattacatcaggtgacaccatcaagacattgtttaatgctaaggttgttttcttattagattcttttttcatcgcagcaattgcaattgcaccaaatgtcccaataattgttgctattaaactggacaacagcgctagtaggatagtttccaaaaatatcgctaataagcgattatcttgaaataaagtctgataatgagcccatgtaaagtgctcaaatttattcatgtttttaccactagaaaatgaaaagtaaatcaaataaaaaatgggtacatataataggatcaaagtaaaagcaagatagatcttagcgattaaatgtctgtttctcataaatctaccttctttcttctagcctttttgctagtaatcaacatgactaccaccatcagcgcgattaaaattactccaattgtggcccccatattccagttcattgtggtcataaaatactcttcgatagcagtccctaatgtgattacccgattgccgccgatcagccttgttaacataaataatgacaatgatgggataaagatggcctgaacgccgctttcaactcctggacgagaaagcggccataaaacatagcgaaaagtttgccatttactagcacccaaatcctcagaggcatgaatgactgcaggattaatctctttaatcgcattaaaaattggcaaaatcataaacggaatttcaatgtaagtcgccacaaaaataaaagcaaaatcagtaaacaaaatatttacgggaccaataccaaataaatgtaaaaatttatttactaaaccgtcattacctaaaatgccaataaatgcatatgctttaagcagcaaattaatccatgttggcaaaatgatcaataacagccacagctgctggtttttcattttaattaaaaaatacgctgccggatacgaaattaccaacgtcaacaaggtgatcaaaaatgcataccaaaatgagttaagcatcatttttaaaaaggtaccatttttaaaaaattcaacgtaatttctgagcgtgaatgcgttattactatcagtaaacgaataccagagaatcaataaaatcggcaaaatgacaaagagaataatccacagcagatatggaatcataaaaaacatctttttatttttcattttcatccgcctcatacttttctagtcgagcatcaaaatcgtgttggctttcatttaaccgcatgacgtgaatatcttctggatcaaaaaagagcccaacacgttgtcccaatttaactccattagtagaatggatcagccattcattttcattggcatcaattgccttaatctcaaagtgatcacctaaaaataattgcgtctgtgctgtaaccacaatcttcccatcttctggtttaacaatatccaagtcttcgggacgaataactacttcaaccttttcattaggcttcatcccaccatcggcacatttaaatttattattagcaaattccacttcgtaatcatgaatcattcgaccagataaaatattggagtcaccaataaaacgtgctacaaagtcattcactggctcatcgtaaattgctaccggattaccactttgttgaatctgcccatcatttaaaacaaaaatttcatcactcattgatagagcttcttcttgatcgtgcgtaacaaaaataaaggtaatgcctagctttttctgaattgcccgtaattcaaattgcatgtcttttcgtaaacgtttatccaaagcagatagcgactcatctaatagtaaaaccttaggttcattaacaattgcccgggcaatagctacacgctgctgctgtcctccactaagttccgaaatttcgcggttagcgtaaccgtctagacgaaccatatgcaaagcatctttaacagctggcttgatttcactcattggtcttttcttaattttcaagccaaacgccacattttgaaaaacatccaggtgtggaaacaaagcataattttgaaaaactgtattgatatgtctttttgaagcatcaaggtcagtaatatcattaccatcaaagaggacttgaccactagatggctgagtaaagccagcaataattcgcaaaattgtcgattttcccgagccactaggaccaagtagtgaataaaatttaccagattcaatagttaaatttatatcttttaatgctacaaacccatcatcatattttttggtgatgtgttttagtttgataatatccatttccatccctcacataaaaaacagctgcaagccttccagcctgtagcttgtctttgctaaaatattttacttttctttgccgataatcctaacttctgtgcgtaagtcaatgtcaaacttttctttaattaccttttggatcaaatgaattaaattcaaataatctgttgcagtagcaccgcctttattcacgataaaacctgcatgtttcattgaatcttgagcgccaccgatttgtttaccttgtaaaccagctttaataatcatcggaccaacaaagtgcccagtaggccgcttaaagacactgccacaagatggatattcaagtggctgcttataacgacgtaaagcatttaaataatgcatatgatctaagatctctaacttatcgcctgacttgagtgcaaaagtggcgcttaatacaatatcgccattttcttgaactaatgaatgccggtaagaaaagttcatttctgcgtttgaatatgttttaaattctcctgctctggttaaaacattaacgctttgcactacttcttgcatctcaccgccataggcaccagcattcataaaaataccaccgccaatactaccaggaattccagcagcaaattccattccgctcaaaccatgatgagcagccgcaaaagctgtatcgataatccgtgcaccagcatcagctgtaacttgattatcttctactttaatctcttttaattcagtcaaaataattactaacccatcaattccgccgtcacggatgattaaatttgaggcattgccaataattgttaatggaatttcattttcacgtgtgacttttactaattgttctacttcatcagtcgtcttaggaaaggccaaatattcagctggtccacctgtcttagtaaaagtatatctgcttaatgggatttgctctttaatatcaatccctttttctttcaaatcaagtaattccacgctgttgcctccttaaagtttcttgttttattttaccgcataaaggcgttagcttcattaatattaatgatatacttttttaaaaggagaattttatgaattttattgcaatggactttgaaacagccaaccattatccagaaagtgcctgttcacttgctttggtaatggtgagaaataataaaattgttgatcgcttttatacagtaattaatcctcaaatgccatttgacgcgcgaaatattcaagtacatcaaattacagctgaggacgttaaaaacgctccaacaatggcagaggtctggccccacattaaagaattgtatcaaccaggaatgcttgtagccgcacataacgctcgctttgatactaatgtcatgcggcaaagcctggcacgttacggtattgaggagccccactatttggtcattgacactttagctagcagtaaattactcgaaccagaactgcctgaccacaaattagacacagtttctgaggccttaaacgttgaattgtggcaccaccataacgcattaagtgatagtgaagcatgtgctgggattttaatcaagcaagaagagcaatttggtgatgaagcaatcaaaaatttggtttatcagatatgaaaaatctctaggaattttgatcctagagatttttgctttacttattaaattcagttaacgcagctttgacccattcttcattgcgcttaccatgaggagtaaattcaacaacccgtttagttgaatcccaactatcgtccactctggtaatcgtaagttgcaaatactcatctggcaaatcattcattactagttgtggccattcaattaccactaaacctggttctgctaaatagccctccaaatcaatcgaggataaatcatcattttccaaacgataaaagtccatatgaaagagcggcaacttagcttctcgatattcacgcacaatggtgaatgtaggactcttaacaggccgatgtatgcctaatgctcgccctaatccttgagtcatggttgtcttgcctgcacccaaatcaccatttaatagtaataaatcgtagggctgggccgttttggctagggatgcacctaatttctgcattccatcagcagaattaatttctaactttgtcattacttttcatcctttgctaaagcttgtgcggcagtaacaattgctaaatcataaatatcttgttcactgcagcctcgagataggtcattcactggagctgctaaaccttgcaaaattggaccaacagcagtgaagccacctaatctttgaaccatcttataaccgatattgcctgattgtaattctgggaaaacaaagacattcgcatgtccagctacctttgagtttggagccttcttttcactaactgcaggtacaaaagcggcatcaaattgcaattcaccatcagctggaatttctggatgatccttttggaacatagctgctgcatcatgtaccttatcaaccattggtccttcggctgaacccttagttgaaaagctcaaaaatgcgaccttaggatcaatttcggccatcttggcagtcagagcagattgatagccaatttcagctaaagtttcttcatcaggattaatgttgatggcacagtcggcaaaaatgtaacgctcatcgcccttttccattacgaaagcgccggatactcgatgcatccccttagctgcatgaattaattgtaaagctggcaaaacagtgttagccgttgagtgagcagcaccggaaaccataccgtctgcttttcccatcttcaccaacatggtaccaaagtaattaccttgggctaacttgagctttgcttcagcaatactggtatcttttcgtctagctttaacaaattccgctgccatttgatcaagttcatcataatgattgaggtcatagatcttaacaccagctaagtctaaattattttctttaactaacttagcaatctcatctggatttccaattaaaattggttcgataatgccatcttttttcaaattagctatggcagtaagaattcttaaatcatcgccttctggaaaaacaattcttttcttatcttttgctgcttcaacttgttttttgaataatgaaaatacgctcattttttacctcttatgctaaatcagatttacttatcgtttctggcaattgccagtcaatcggcgtttcatcaaagttcttcaatgccatattacaccgcgaaaacggtcgcgagccaaagaaccctcgatcagccgaaaatggacttggatgtgatgatttaatgataaaattcttactttgatcaattaatggaatcttgttttgagcaaatcgaccccacaaaataaagacgacttttccacgctcactcagagccttaattgcagtatcagtcacatcttcccaacctttgccttggtgaccgttagcatgcccatacggtaccgtcaaaaccgcattcagcaaaagcacaccttgatcggcccacttttttaagtaaccgtgattaacaggccgagctccgacatcatcatagagttccttatagatatttttaagtgatggcggcaaagttgtacctggcatgacggaaaaactcattccattagcttgaccaggattatgatatggatcttgacccaaaattaccactttagttttagcaaacggtgttaatttaaaagccgtaaaaatatgatacatatcaggataaatttgtttagtagaatattcttcttttaaaaaattatgcaattcgtgatatttctcacttgcaaaaacaggatccaatacttgatcccaatcgttgccaattaattctttagccaagtcttacaccctcttttcttctcctctttatggtatcattaatttaatactaaatgggagagaaattatgatcaaattagttgcttgtgatcttgacggcacgttgtttaattcagagatggctgtttctgctgctaatgcaaaagctgtgaaaaatgcacaaagtagcggcattgaatttttaattgcgactggccgggccccacgcgaatcacgttcagttctcaaagatgctgatttgcataccagttttatcaatcttaatggtgccctggtttttgacgaaaatgagcaattaatgatcaaacacagtattcccaaggcaaaagcacaacagctagtgcatttactacatcgatcaggcttttactttgaaattttaactgccaatcaggtttatagtgaaaatctagatcaacgtatttcaaatgtagctcatttaatggtagatctaaatcctctacttgattttcgtcaagctgtagcaatttctgctggtaataagactattatgaatatgaaacaaatccacagtttcgataatttattgcaagatcctaaaatagaagtaatgaaaattattgcttttgactctcggggacatgaagcttttaccgatatcaaaaaagaaatcgctacaatgggcgatctagtagtaacttcaagttcatcttctaatattgaaatcaatgagcaacatgctcaaaaaggtcttgccttacttgattatgccaagttaaaaggtatcgagcctgaggaaatcgctgcaatcggtgataatttaaatgatgagagtatgatccgagcagcaggtactggcgttgcgatgggtaatgcgattccagctattaagaaaatagctcaggtagtcaccaagcgaaacaatgaagatggagtagcttatattttaaataaatttattgcagataataacaatatttaaagttatgaggtgagtaagtatgcgattttggctagaacttaatcaggaaaaggattacggtcaaattcctgtgcttaatcaaaatggaaaagctgaattttttattcaaggcaatcttgataatccaaaccacactttatatctaaataatttccgtaaacaggaagtgggacgtctgttttctgatggtgcgggcctaattgcttcgttcacaattgatgtcgtcaaccactctttagtaggcgtaaaaaagttaaacacacctactgcaaacatattctatttgacccaattaaagtatattgttacaggtagtattaaacgtggtacttatacttttcgttctggaatcaagagtgtagcaagtgtccaaacaatcatgggagatcgcggaggcgttttaatttgtgatattactaagcctgaagacgtcccctttattcttttgacatccgttctatttacacaatggcatgttacgcctttgaaactgcctagttttccgccaattggatttgaggtaaattcaaattaaacaaaaaagcagtcatgaaaattttcataactgctcttctagaaagtgatatagatatagatgtatcttctgccataaagtttatatttattaagtaataaggaattattaggcagagactgaataatgaaagttaaatctaatttgattcaacctccatagcttattatacttcgttcagccaaaaatacaagggctagatgttattattttactttaaagatagctaaataatgcatttagagctagcttatagcttaataatttgttatttaacttagtacatctatttttctaaacaagacaactttaatttctacgtaaattgcaataataaattgaacacttttaatcaagctgcttgatagattagatctaattctctttcaaagatttcatctggtgtatgatatgccaatatctttcttggtaaagagttgcaccaggtttcaatgtctatgatgtcttgtagtgaataattgtctattgcctctcccttaggaataaatctgcgaatgagtccattatgtctttcaacggttcccttgtcacaagatgtataaggatgagcatagtaaactaaagtatttgatacgtcttctaagcttgaaagatctgcaaactctgagccattatcagtggtaatggttttaaaaatatcattccaatgttcgctgtattgcctttggagttctttaaaggcctgcatgacactgacagaagtcttgtcaggaatacgaagaattaagaactcacgactcatacgttcagataaggttagcagcacctcatcatctttgctcttatgtccgagaactaaatcgcattcccaatggccaaactcattacgtttattgatttctttaggacgttcttcaatgcttctgccaagttttttcttatttctgcgaatacgatgaagcttggtattgcgtttaagcttctctggcaagtcgtaattatgtatatctaatagaccttggtcgacataattgtaaagagtcttagtacagacaacatctctgctgctaaatgcgccaacagcggtggcgcgattactgcacacatcaagcgaccagccgtctttaaagaaatgtttgtggacatagcgcatgaattgagttttcctgagaaagtctgatttacgtccacaatttttacgatgagcttgatatgcatcatgcccttgagtagccttatatcttttgactttgccatgatacagttctacagtaccgcgcttaacctcataactgatagtagaaggggaacagtttaattcacgggcaatggcacgcaaagaatagccatctttcaaacgcaattgaataataactctttcctcgaatgataaatgcttgcctttaatgtgatgattcatggtagaatgtaaagagtccattttgacctcgtttctaaatgttgtgtggtaactacattctatcaaacaggtccgaatggactttttattttttattaagtgttcaatttaattttacaatcagcgactttaatttctattaaaaaatatagtgaaatgatcaagtgatttatcaatggcttgatcatttttatttactttatcaacgaacttgtttttagctatcaaactatataaaaaagagccaaatctaatgatttgaccctaaaaattctagattattaatctaaattattttttatgaattagtcttggtagtttaccaattctaagaatgattctggtactaatgaagcaccaccaaccaagccaccgtcaatatcaggcttagccattaattccttaacgttagctggttttacagaaccaccgtattgaatacgaacgttttctgcagtttcttcgttgtacaagtccttaacagtttcacgaatagtcttgcacatttcttcagcttgatctgatgaagcagtcttaccagtaccgatagcccagattggttcgtaggcaataacaagtgaagatacttgttcagcagttaagccgtctaaagcagccttaatttgagcaactacccagtcttcttgcttgttagcttcacgagtttcaagtgattcaccacagcaaatgattggcttcaagccattagcaaagattgccttagccttcttgttaatgtcttcgtcagtttcgtggaagtaaccacgacgttctgagtgaccaataattacgtagtccatacccatttctttcaagaccttaggtgaagtttcaccagtgtaagcaccttcgtcttcaaagtaacagttttctgcaccgatatgtaagtttgagccttcagcagcttttctcaaagcgtcaaggtcaactgcaggtgcacaaataagtgattcaaccttacttgggtctggtaacttatccttaacagcgttaacgaattcagtagtttgttctggattcatatgtaacttccagttaccagcaataattggtgtacgactcattaatctattgtcctttccttactattacttgtctgaaacgcaagcgatacctggcaattccttaccttcaaggtagttaagtgaagcaccaccaccggtagaaatgtgggtaatcttaggagcaatgcctaattgcttagcagcagcagttgagtcaccaccaccgatgatagtagttgcatccttaaggtctgccaatgcacgaccaacttccaaagtaccttcagcgaagttaggcatttcgaatgcacccattgggccgttccaaacaacagtcttagcatccttcaagatttccttgaacttttcaacagtcttaggaccgatgtcaagacccatcatgttgtcaggaatatcatcaccaacaacttcacgtgaagcatcatttgagaattcagttgcggctacgttatctacaggaagaacgatcttgtcgccagccttagcaagtaattccttagcaaggtctaccttgtcagcttcaaataatgatttaccaatgctgtggccttgagctgctaagaatgtgtaagccataccaccaccgattaaaatatggtctgacttaggaattaagttttcgataacaccaatcttgtctgaaaccttagcaccaccaagaatagttacgaatgggtgtactgggttttcaacagcatcacctaagaacttgatttccttttcaagcaagtaaccagctgctgcaggcttgccagcttccttcatagcagttgcgataccaacgtttgaagcgtgacttctgtgagcagtaccaaatgcatcatttacaaacatgtcgccaagacttgcccagtattcgccaagcttaggatcgttacctgattcacgcttaccaaagtcgttgtcgatgtcttggaatctagtgttttcaagaacgataacatctccatccttcatgttgttgatagcgtcttcaacttctttaccttcgtttgatggtacaaaagttacaggcttcttaagaagttcacttaaacgttcagcaactggctttaatgataattccttcttgtcagcatctgacttaacacgacctaagtggctaagtaagatagccttgccaccgtgttcaatgatgtacttaatagttggaagtgcagcaacgatacggttgtcgtcaccaataacgccatccttaattggaacgttaaagtctacacgtactaagacctttttgcctttaacatcaagatcgtcaacgattaatttagccattataatcctccgattattttgatattttttcttcaaaaaaaggcggaaggaagaatctccctccgccttctcaattaccacttaactatataatcagttaattaaaattaatgattaaagagttgcaaagtgtaataaagtacgtaccatttggcaagtgaatgagtattcgttgtcgtaccaagcaacagtcttaactaattgcttgtcacctgcagtggttaccatagtttgagttgggtcaaagattgaaccagcagtcatgttaagaacatcgctagaaacaatgtggtcaccgttgtaagcaaatgatgggctttcgtacttcttcatagcttcgttaacttcgtcagcagtaaccttcttgctcaagattgataccaattcagtttctgaaccatctggaactggaacacgttgtgcgtgaccgttcatcttaccgttcaagttaggcaataccaagccgatagccttagctgaaccagtagtatgaggaatgatgttttcagcagcagcacgagcgtcttgttccttaccactacgtgaaggaccatccaaagtcatttgagtaccagtgtatgcgtggatagtagtcatagtagcaacttcgataccgaattccttgtccaaagcgttagccattggtgcaagtgagttagtagtacatgaagcagctgaaacaatcttgtcatcagcagtcaaagtgtcttcgtttactgagtaaacgatagtcttcaagtcgttaccagctggagctgagatcaatacacgcttagcacctgcatcgatgtgagcttgtgacttagccttgctagtgtagaaaccagtacattcaagaacgaagtcaacaccatcgttcttaacccatggaatgttttgtgcttgtggttctgcgtatacgtggtaactcttaccgtcaactacgattgaatcttcagttgatgaaacttcgtggttgaaagtaccatgagtagtgtcgtacttaagcaagtaagcaagcattgctggagtagtcaagtcgttgatagcaacaacttcaatgtcctttgacttttcgccaaggtccataatacgacggaatgctaaacgaccgatacggccgaaaccgttaataccaattttaactgtcataacctaaagtcctccttaagaactataaacaacatttattttaaacgggatttcatttcccctttaaaatcatatttgaggcgccctcatcagtgattagccaggtttgatgaggcgcattaggcatataagctttaattgcttgagcctttcgggcaccacaagcaaaagcaaatatgtggggtattttgtataggttctcgaactgcaatccaacctgggtgatgcggtcaacaaccttgccatgttcatcgaagaaacacccgaaacattcggtgacggctctcttctcacgaagttcagatagcttaattgaattatagcctctgcgctgtgccatttcttgagctaacccaataccatgaatcacagcatcactttgagaaatgtcttgcagaacatctgcgatcgaggactcacgaatcaaagatttgtaagcatcatctgaaacctgctcaggtaaatataatgtcttataagtacctgaagtcttagcagccatttcttggacgattgtattactttgcgtctctacattttcgcccaaagctcctcgacctggaacaaattccaactggcgattgttagctaaatctggtgataaatacttagcagatctagctaacgccgctccacctagaattgtaactattgaatggcctaaaggcaagagtaaattcaaagctgaacttaatttttctcccatctcctcatatactcggtcttggaaatccgcattaccagggacgatcaatgttctttcaatccctaattttttggctaatgctacttccgtttcaccggcattaaagaggcgatcaagcaatggtcctgcatcttttaatgttttctcacccttttcagttaaaaacatcccaaaactttttgtttcaatcaatcctaattgacataagtactcagtctcagttctgatgtttctctctgaaagccctaaatgctgagcaacactccgacgtccaattggcgcatgtagcgaaatctgctcaaggacaagatacctttgtcgaagaatctttaagacgtcgggaacgagcgcttcgagcaaagaaaagtccgaatccatcgttccctcctttccatgggacatctatcgaccacctacgtgtcgttttgtgtcccagaatgcttaaaaatataagagaaacgtacttttcattcaattcatacatttcccaatcgacactgttagtataacaatgtatttttcgtaattcaagaaaaagatacacgattttaaaaaagtcgtaaatcgagtaaaatcatttttatttcattactttttttgatatactaccacttgtgaatcatctgggcccttagtgtaatggatcgcacataagattccggttcttagaatctgggttcgactcccagggggcccatataactacatgttgaagactaccgccatctcggtatttttctttttttataccaaaaaagcattcctcacggaatgcctttttcaatatcacaattatttagtgcttgtagtcatcaactcagcacgttgtgctaactcagtgtacaaagttgagcctgaaacagataaaccttcaatttcacggcgagtgttgaaatgatggctacccttataagtaccatttgctgctacacggaagatgtagtcgttaaaaccaatatagaattgattgtggttgctgtcataagcaaaaccttgaactggtgaaccagttacgaaattactttgagtagcaccgatttcttctggagcccaagtgtcaccatttctagttaacttccagtattcatattggtgacgaccaccattgtggaacaatgcatacatagtgttgtcgccaacaaaggttgcattatggaagtaacgaggatatgcactgctgccgttccaggtcttaacagtccagattttgttaatcttcatatcactctttcttacttgcataatttcttctgaagctgttgaattagcagtcttattgttattagccaaaacataaatgtagcttgaagaagagccaagtgattgaccatgacctagcttaatgtatggtgaaactttaatattgtttgcgtagcttctaaaagtgctccatcccatagtagttaagttttgagcagcatatttactcttaattgcattcaagttgtaagaaacaagatgtcctcttgagtcgctactgctagtgtacatagaagctgtaaaaataccatcattaacagtaataccttcaggaattaccccaacttgtcccattgcatcagcagcttgaccatagcctaagctgacaaaacgtggttggaacaaacgagtgcgcaaagtcatgccgttacctgaatagctatttgagctagtttctgaacgataaccgtgtgcctgattccaatttcttgatgatccctttgagccaccattccaagtatgaactgccttaggaccactcttaacagaagcacctgcactagtaattccttcatttgtatctgaacgaacagttacattaacgcttgcctttgccttaccatatgaataatctaccttagtagtgccggcacggcttgaactaacagagctatgtgaaacattaaccctatctggattaattgcagtaccttgtccatctgttgcatagttaattgcatccctagttggaaaactgtagttgctgttgtgaactaagctaacatcttgagctactgaaatttggtttctagcaaaaaagttttgacttacccaacctacattgcgtccatcgacaataatgtaccagaagttacctttcttggtagaaacatacttcttagattgaatttgaccatgcttaaagtacttggtatttgaaaatgcacctgatggtccttttttagatacattatgataaatagcgtaattaccattgccagcaatcttagtaactgccttgctgtagcttttggcatctaccttgctttgactaatggcaaaaacaccaccaactaatgcagcactggccacaaaagttaataacatctttttcccttttaacatccttattaatcctcccatatgaaaaaatcacgttcattttagcacaaatttatcaaatgaaacatctaattattaaaaaatttcctgaacaacaagactttgaaaacgcttctgttatataattaaaaagttcacataaatatataaatagtaatagggagaaattttatggtcgaatcacaaaataattccaaaaagatgatgtggaccaccctagcaatgatggccttctctaccgtgtggggctttggtaacgttgttaatgggtacgtctactttgacgggacaaaggttgtctttagctggatcgtcatgttccttctctactttgttccttatgccttaatggttggtgaacttggagctaccttcaagaatgctgaaggtggggtttcctcttgggtaaatgccactatgggcgcaaaatgggcctactacgcaggttggacctactgggcttgccacgttgtttatatttccagtaaaggtactggtggtttaagagcgatggcctggggtatcttcggaaatacaaaatggtatgatggcttacctaccgcttggacacaatttgctacattagtagtcttcttgcttttctgttgggttgcaagtcgtggtattccagtattgaaaggcctagcaacaattgctggttcttcaatgtttatcatgtcaatcttattcatcattatgatgtttgccgcaccagctattaatccttctgctggtttccacagtattgactttaactggaagaatttgatgccaaccttcaacgtaaaatactttacttctctttcaatcctagtatttgccgttggtggttgtgaaaagatctccccttatgttaataaggttaaggatccttccaaaaacttccctaaggctatgatggctttagcaatcatggttatggtatctgctattttaggtacttttgccatggcattaatgtttgaccctaaggtggttaatgccaaccttaacgaatacatctctaatggtgcctacatggcatttgacaagctgggcgaatattaccatgttggcggcttgttcatgtacatctattcatggtgtaacgtaatcggtcaattctcaacattagtaatcagtatcgatgcaccacttagaatgcttttgggtagtaaagaagctaaagaatttattccaaagggcttattaaaactcaacaagcatggtgcttacatcaacggtatctggatggttgttgtcctctctggtggcttaattgctattcaagctttagtaccaaatgctcaagctgttatggcacaattagttaaattaaattcaactactatgccacttcgttacctttgggtatttgcggcatatgttgctttaagaaaacagcagcaaaagttcaacactacttatcaaatgactaaacatcaaggcttagcctatactgccggtatttggtgttttgtagttactgctgcatgttgtatcttgggtatttactcaccagatccatttaccttattccttaatatcttgacgccaatcgtcttgattgcattaggtttaattttgccaggaattaagaaatatcaagaagcaaaggcaaaataaaatttaaatacagaattttaaaaaggaagcaatttcaaaagactgcttcctttttagtgtatatttttatttattagcccaagcatttaccaatgccttgtacttggcaacgctaattcctgcacctttactgcttcctaaatatgaatcagcatttccataaccagtattgcttacattggcaaatcccattactctataatttctgttaatcaaattcaagtagtgtcctgccattttatagccgttcgtgccctctacggccgcatcataagttgccgtccaagttggactatacttcgccggcttcaacgaatgattcttttttacatcataattccaacttttcttttcagagaaccaagtatcaaccggatctaaacccacactttgagtagcgatgttttccaaaccaatcgacttgaaataatgagtatgctttaagccaccacgtttttgatagtcagcatttaacattgaggctgctgtcaaaagtggtgacacctttaatgaccgaaccccttcacttctacgtgctctattgacactattcaaataaggcaatacagctttaatattcttagcactagttgcatcatcatttgaatgcaagtcaacgtattcattgtaccaacttgccttaggctttttacctaagcgacctgttttcaataatttcactgctgatctagcagagcttctttgccctttagtcaaagatttgtttttagatagatatgtcataaaatcaacggcatttttggctgccttaactggcttggaactcaataccgttaaagataaggtcatcatcacagctgatgcacctgcaattaaaaatcgttttttcattctttttctcccatattaatatatgtgaactacgatttaattgtagcacatacactaatggaagattttccttttaaattgcattatccatccatcttaacgtattgtcctttttcatctacaacacctttgaaatggtgcatgctgccatcttcggcctgaaattcacctaagtcaatttccccatagccctttgtagaatcagtaaccttaacatcatcaaaagtttctctgaaaaattgatgaacaattctactcttcaaccgtatatcctttgaatgctcaaaggctgcagacaacgtaaagccctcatctaattgttccttgataaaaacaattagatacaaggtcgctaaattatagcggcgcacaccactttgatcatctgaaatcggcttaatgtagcccttagtttcccaatagcgcaattgcctttgcgaaacaccggtcaatttactaacttcaccgattccaatttctaaattttgaaaaatgtcatgcataatttttttagatttcatcctgataccaccttacagtatagttatattttatatattgttgttatcttttgcaacacttgtgttaatttatctaacttatttgtaagattatttgacaatggaaaattttaagcctatagtttttatagttaacttttataagagaaaggaatattacatgaacaagcaaccaacggatattcatggaaaagcttataatcgaaacctactagttttagttttaattataggttctttctgtactgtattaaacggaacactgctttcaacagcgcttccttcaattatgcgttcatttaacatcagcaccgcaactgctgaatggctttcaacagcctttctgttagttaatggtgttatgatcccaatttctgcatggctaatcaatcgcttcggttcaagaaaaatgtatttgtcagccatgtcaatcttctttattggaacagtgatcgccgcaattgcacccaattttggcaccctgcttgctggaagaatcattcagggattaggcgtcggcgttactatgccacttttacaaacaatcatgctttccatcttcccagctaataaacgtggtgcagcaatgggaactgtcgggattgttattggcttagcaccggcaattggaccaacattatctggttggattgttgataacctttcttggcgttatcttttcagcatcattgccccaattgcgggaatagtaattatcttagctttctttttaattaaagatgttttaccaactaagaaagaaaaaattgatgtttggtcagtaacaacctctactctaggcttcggaagtctgttgtatggtttttcagaagctggtaacaaaggctggaccaatcccgagattttaggatttattggatttggaattatatttgtaatcctattcggtatccgccaattgaaaatggatgacccatttttggacattaccgtttttaaacactttgaattttcactggcagctgccttaagtggtatcaccaacttagcgatggtcggcattgaaatggttttaccattatatattcaaaatttgcgtggcgtttctgccttccattcaggtttaatgttactacctggtgcattgatgattggtattatgtcgccaattactggccgtttattcgacaaatatggtgcacgtaaaatggcaattactggtatgactttgttgaccattgggactattccattcgtctttttaactgaacaaagttcatacacgatgattatcattctttacgcaatcagaatggtcggtgtagctttggtaatgatgaatgttactacatctggtatgaattctttaccattaaacaagatttctcacggtactgctgttaacaacactttcagacaggtattaagttcaattggtactgcaattttggtatctgttttaactacaactaccaataataatatgcctggtaaaagtttacttcatgcactgccacttgaatacaagactagagcaatcagtgcaactttagacggttttcatgcttcatttgcaatgagtatcctcttctcattaatcgcattagttctttcattcttcttaaagaagggcaatcgagcacgtgaacatcaagaaaaggtggatggttaaatgatacttttaattctaatcgtagctgcaattatgtttatttactttaatatcatccctggaaaaaggcatacttctattgcatggctatcattaatcgtaacaattctttgtgttgttggcattgtagaacatgattataatcactggggaatgaaaactgaaacaacttcaagcactaatactctagtttccagtgctactcctcgcctgccaattttgctttatcagcctttaggtaatggaactgaaaaagtttacctttataaaactggtcagcttcaaaagaagccaaaatctattaaattacgcgtggtgctagttaaatcgttttagttaataaaaaagtccaatcttgttagactcgacttgtaaatagtaataatagaaaagagtctgatctgattgaactgccttaagcttaagcgttttagccaccatttacaagttagttttaaagatttagtgataatttgtcggcactggtatcgtttgtatgcaccggctgagtttactcatcggcgaaatattgatcaaattaaaactacggacagtctgattttggctttacttatctggcaagctaagacaggaattgaatcacaaagaagattctgtgaatgtttcaattgtttatcacactcacgttttaatcggcgttcacgtcagctattgcaattgatttatcagatacggcaagaaatgaataaaaaggttgacctgaatggacagttcttgatcattgacagctttccggtacctgtttgccaaccaattcgaaactatcgtgctaaaatttttcgcggttatgccaacattggttataaggccaccaagaaaatttacttctatggtttcaaagttcatgccattgttagcgatgacggttacattcttgattatgtcgtaacaaaggcatcagttcatgatgccagggagacagttgaactgatagaaaatacccatccatctaattactatcttcttggcgacgaaggctatttaggcaaagaactgcatcaacagctaaaacaaatgggttacgaactttggacaccatatcgtaaaaatatgacaggagctaaaaagcacaatgatcatcaattgatggctattcgcagaacaattgaaagcgacttttcgcttctgacctattacaatgccgagaacaatcgagcacgtagtctgataggctttcaaagccggttggaaattgcaattttagcttataatttggcttattgtctagaacgatttaactagcaccacgcgtattaaattagataaagtatcgacaaaagtaaaacgaagcagccaaccaaaagtaacgattaagactactcgctacacctatagcaatacctttaatcaaataatgtttggcgtctttggtcatgacaaggagttaaaacacagagaatatattttttctattccctccaactggaaagtaatgtcagttaacgatgccaagcagttgcaaaaacaaatgatgaaaaaacagcagtttttaaaacaaaaatcagcccaataaaataatgaagctcaaactttgatcatgatatgaaccccgaaattcggacatgaatttcggggtttttatttatggctaaattatctaaacatgacaaaattgatatttacaatagctagaaaaattaaattcattttaactcaaattttaccatatgatttaagttaacttaaatcacctttacaaacgcttatgaaatataatttaactaaatctaaatgtagaaaattatttttatcatactgcctatttcaattgcatcctatcattaaagtaatttttataagccaaatagccactaatcacggctccaaggccagtggcagaaagtaacataaatgtaatcataatctgatacttaattgcataaatgggatttacaccagcaaaaattaagccggacatcattcctggcaaatttactaatcctacagttttagccgaatctatcgtaggctgcatcgcagtcttaatgctccttcttaaaattggcatcgatgcagttttaatatcactacccaaagccaacttttctaaaacttgttgatgcagatcattaaagctatcattcaacgctttatagcataagccaactgccaccatttcatttccagcaatcatccccgtaatgggaatgacctgcatagggactggtttaattacgccagaaaaaatcagaattcctaatgtcacgtaagtccctaccgcttcggctattatcgaattccaaatattccgccccggattaggatcacgctgattagcattccaagatgcattaaaaattatcacaatagttgaaaccaaagttagccacaaggcattaacatgaaaaataaacttcaaaacgtagccgattacgactaactgaattatcgccctaatcacgctaattaaaatatccttggttagtcctaatttttctttcgcagaaattccaatggaaactaacaccagtgcaaaagctaatactaacgaccagttgctaactacaacatttttcattcgattattccgcctttttttactcttaaaatattacttgcttcatcaatttcactttgatcatgtgtaacttgaataattgtcacgcctttctcagaaacatccttaatcaaattatgtacaatatctttactttgattatcaagcccggtagttacttcatctaagagcaatatctttggtaaaaatattatgtttcgaattaacgcaactctttgcttttcaccacctgataaagcagtaatctttttatctaaaaaatcagcagagagatcaacttgattaagtaaatcagctatttgcttgtcatttacatctacttttctaatttcatacgggaaaatcaaattatctcttactgtttgcccaaataaagacggctgctgaaaacaatatgaaacttctctacgatattgaactggatttaaggagctaatgtttttttcttgatatagaatatcgcctgaattagcactaattaaatttgcaatcaatcgtaaaatcgtactttttcctgcacctgatgggccaattaaggttagaaaatcgcctttattaaccttaaatgatacatcttgcaatatttgttttttatctgcactatattggatatgttttaattctaatattttcattcttttgcctaactaaataactcatttttctaattatacaactaaaaaaataaaggaaatccaatattttcattgaatttcctttatttaaattaatatcgataatgattacttagtcaacttttgtttactttcaagtaattcagcacgttgagctaagttcatgtataacttgttgttgtaggttgcgataccttcaatttcacgaccagtgtggtattggtaagtatccttaacttcaccatcagttgcaatcttagcaattacgtcattgaatgcaaggtagaagttattgttcttggcatcataagtaaacccttgagtgtatgtgtttgctacaatgccacccttagttgcacctaccatagttggataccagttatcgcctttgcggttgaattcccagtattcagtttggtctttttctttattataaagagttgtgtaaagcttgtgatcatttacaacaacaccattattgaagtaacgaccgtctgaatcactaccgttccagcatttaatagtccaaatcttgttaatgcacatatcgctcttccgaatttggattaactcttcagacatattgctcttgtatgaaaccttattattgttatttagaacgtaaatgtatttatcagttgagcccattgcttgaccgtgaccaattggaatatatggactaactttaatgttcttaacgtaagaattgaacttcttttggctcatatcaagtaagtattgtccgttaaatgcattggttaaatggttaagattatatcctacaatatgaccattgctaatcagggtactacttaataaactagtgtacaaccagccatttgacatggtaattccttcaggaatatgacctacacggttaatatagtcatcatttttaatgtcacggtaaacacttaataaaactggttggaagaagcgagtagtgaaatctaattttccgctttcactatcataagcatgcttattcttatcaggagtaaaatcagtcttagttacatagttagcagaactgccgtagtaagtcttccaggatttcaaatcgccgttaaatggcttagcttggacgctatcagcatcagcaattccttccttagtactctttctgacagttaccttaacagttgcctttgctttaccatagctatatttaacattataggtacctggagttgagcaatcgattgcatcttctgaaatcttaatatctgctgtatcaattacagtacccatataattggttacataacttactgcatcagttggatcaaaatcgtagtgactattttgtactaaactgatagtctttggtacagcgatagcatctcttgtaaagtagttttggttaacataaccaactttacgaccatttacataaatacgccaataagttgcatcctttgtcttaattctctggtcagattgaatatgagcatattgataatcgctagcatcagcaatcttaccactaggtttaccattactaatctttttataaacaggataattcttattgctacctactttaaccattaagtcataagaagtacttgtttgagctggtcccttcttcgcactggaatcagtcttagcagtatctgtattactatcagtagttttagaattatctgcaaatactgcatttgtagaaccaattaacaaaccaacacccagtgctacagctgaagtagcagttaaaattttatttgaatacttcaaacctatcctccgtatcttatattttgcattttacttttatattataatatataaacactgttagctaaaatacatttttattaccattgttaccattgagcttctttatttgacactttcattacgaagtgatttaattagcactgtacttgaaagagtgctaattaatacgaaatcaattaggaggcaaatttatgctagtacctacagttattgaacaaactgctcgtggtgaacgtgcttatgacatttactcacgcttattaaaagacagaattatcatgcttagcggtgaaattaatgaccaaatggctaactcaatcatcgctcaattactcttccttgatgctcaagacaataccaaggatatttcactttatatcaactcaccaggtggtgtaatcacctccggcttagctatcatggataccatgaactttattaagtcagacgtatcaactattgcaattggtatggcagcttcaatggcttctatccttttgactagtggtaccaagggtaagcgtttcgcacttcctaactcaactgttttaattcaccaaccattaggtggtgctcaaggtcaacaaactgatatccaaattgcagctaacgaaattttgaagagccgtaagaagatcaacgaaattttgcacgaaactaccggtcaacctttggaaaagatccaaaaggatactgaacgtgacaactacttaactgctgaagaagccaaggaatatggtttgattgacgaaatcatggttaataagaagaagtaattaattattaaaaattattcacactctaaaaggagcttgcactcattgtgcaggctcctttttcttattctcttaaactctcagctaactcatgtagtttcttaaatcggtgattaactcctgacttcgaaatcggaccatccggaatttgattagctacttcctttaaagttaattctggatgcgccaatctaaaacgcgctaaaacttgcaatttctctggtagatcatctaagccgttttcttgttcaatcagctggatgtcttctacctgcttagctgaagctgaggctgtttttttcatattcgcggtatcacaattaaccaagcgattaaccgaatttcgcatatctcgcataatacgcaaatcttcaaagttaagcattgcattaagtgcacccactatatgcaaaaagtcgccaatttttgcggcttcttttaaataaacaatatagcctcttctacgtttagttgctttagcatttaaataaaaataattattcatcaacttacataaatcctcattatggtcctcataagttgaataaatctccaagtgataacgactcgtttctggattattgacactacctccggctagaaatgcaccgcgtaaataggacattgctccttcacgtgaagtcataattctctgcggaattcgcgttaccaaacctttttcaggatcccagatttgtaagttttctaggatttcttgtaccttctgattcaatcgtaccaaatattgattattttttttcaatttcatcttgcgcgagacaatcagcaatggctcaataccataagcaatcttaatcagcttaaaaattcgtctagcaatcgcaggattttctgtagttatatctaggctaaattgatgatcgtgcaagtttaatacaccattcattcgcaaaaaagcagctaactctgctttggcatgctctggatgcacctcaagcgaagttagctcctttttgacttcactagcataactagccatcattttccttcattcttttacgtgacattgattcaaatgccagattaataatttcttttcctaccttttcaccatcatgaaataccaatccatgacgttgatcgataaagtcatcagtaatgacacggcagttttgctttcttaagccttcaaagtcattcttaacaggctcaagataagcatcataatcttctgggtgaaatttgctcatatcaattttggcaccattaaccagagcggtattgatataatttccacctaagtgatcgttaattacctgtacgtgttccgcatcactaaagtgatctgtctcaccacgctgagtcatgatattgcaaatataaataacctcggcgtcagtctcacgcactgcttcacctaaattagagatcattaagttaggtaaaattgaagtaaataaactacctggcccaagtacgactgcatcagcttgcataatcgaagccagtactggtaaaacagctctaggctcttcatccgaatcagtatcggtcacccagacacgcttaatccgcttatctttagatgtgatttcagtttcaccagactccgtagttccatccacgaattctgcgtttaaagtcaatggttcattggatgctggaaaaacatgaccatcaattttcatcatttttgacaaagattgaactgcatcaaagatattgccatgcatttcattcaatgccgcaataattaaattaccgattgcatgtcctgaaaaaaaggaatcggatgaatcaaatcgatactgaaaaatattcttttcttcctgaggtaagtcactaagtgataccaaaacattacggatatcaccaggtggaactacgttaataaagttacggattgaaccagatgaaccgccgtcatctgaaaccgttacgattgcagtaatttccgcgttttgatcttttaaggcattcaaaataactggtaaacccgtaccgccaccaattacgactacacggggacgtctgcctttaatcacgcgaacaatccttgtttctccatatggcacaggtgcgcacctactttctaatataacgactcacttcacggtgagtaatatcgactggatattttttagctaaatctcgtgccaactgttgggcaattgaaacactccggtgttgacccccagtacaaccaattgcaatggtcaacttttccttcccctctttgatatatccagggatagctgtttcaagcaaatcaagcaattttttataaaagacctgtgtttcttctttgttcatcacatagtcaaatacacgcttgtccagtcccgtaaatggtcttaattctgaaatataaaatgggttaggcaaaaaacgcacatccattacaatatctgcatcaattggcatcccatacttaaagccaaatgacatcacttcaattgaaaatggctgccgcttgcgatcactaaatgtattgattaatttttgctttaattccttagtcgacaagtttgacgtatcgataatataatttgatctatttttaattggcattaaaatacgacgttcttcttgaatgccatcaagcaagcgacctttgccattattggctaaaggcggaagacgccttgtttctttataacgagcaaccaagacatcatcggaagcatccaaaaataggatagtagcttgcacattgccattatcttcaagtgaattaacttcatccaataaatcgcgataaaatgtcttaactcgtaaatcaattactacggctaccttatgaaagtcattggaattattaattaaatcccaaaaactacctaataaagttggaggaagattatcgactacaaagtagcccatatcttctaagtcatgagcgaccacagttttacctgctccgctcatgcctgtgactattaataattgttttttctcatcagccatactgaaatcctcctctttacaaattatatcataccgggtgtgtcataattgtgcaaaaaaaagaagcctttcggcttaaatttttatcaaatattaacggtgcataaatgcaaccacaatttcattaatgccaaagactaataaccagaatgcaactaaccatactaagcttaaggctgcgattactggattaataattaagaagaaggcaataatcaaacttaaaatattcaaaatcaagttaaatacaaagtatccggttgaaaatgcacgtaagtgccatgaccaagcaatacctacaactgaatcaacaaagaaccagattgcaaataagtaagcgatagtcaaaccaccaatatcatatgagcaaatgaacaagataccgataatgatatctaatacacctgacacaattgctacccaactacgtgagaaaaattcacgaaagcgtgagtaagcagccaaccatacaataccttgaacgattgatacaatagcaaaaatcaagacaaatgcatgcaaccctttagctgggtgacgtaataacacgaacgcaactacgaccattaagataccggcaataaatgcgccccagtcaaagccgtgattatctctagaactagaaaaaatatccatttttattcctccttgcagactattttacacttattcaaggttaataaaaactattggctattgtcttctagcctatttttttgcttcttttgttagtttagtatcacgttctaagactggtttcaaatactgaccagtatagctttctttaactttcgctacttcttctggcgtaccggtagccacaatttgaccgccacgttcccctccttcaggacctaagtcgatcagccaatctgcatttttaattacatcaagattatgctcaataattaaaaccgtattgccttcatctaccaaccgctgcaaaacttctaataaacgcttgatatcatcggtatgcaaaccggtagttggttcatcaagaatatagaaatttttaccagtagaaagcttttgcaattcagcagctaatttcattctttgagcttcaccaccagataaagttgtagcggattgacctaatttcacatagcccaaacctacatcaacgatagtctggagtttacgctgaatcttaggaatattttcgaaaaacttagttgcttcattaatcgtcatatcaagcacttgagcaatattctttccccgataagttacttccaatgtttcagaattataacgagtgccgtgacaaacctcacatggtacatatacatcaggcaaaaagttcatttcaatcttgataattccatcaccatgacaggcttcacaacgtccacctttgacgttgaacgaaaatcttgctttagtataaccacgcaattttgcttcattagtttgagcaaataaggttctgatatcatcaaaaacactagtataagttgcaggattactacgtggtgttctaccaatagggctttgatcgatatcgatgattttttcaatattcttgtaacccttgattgacttatacttacctggcttagttgaattattgtttaatttttgggctaaagcgcgtttcaagatcatattaaccaaagtagatttaccagaacctgagacaccactgaccacaataaatttgcccaacggaaaatcaacattaatattctttaaattattttcttgagctccagtaattgtaatctttttaccattgcctttacgacgcttcaatggaaccggcacaaattttttaccagacaaatattgccccgttaaagaatcaggattctgctctacttctttaggagttccttgtgccataactttaccaccgtaaacaccggcaccaggtcccatatcaaccaaatagtcagcttgccgcattgtttcgtcatcgtgctctaccacaattaaagaattgcctaaatcacgcattctctttaaagaagcaatcagccgatcattatcacgttgatgcaaaccgatagatggttcatccaaaacatacataactcccgataagtttgagccaatttgagttgccaaccgaatacgctgagcttcaccaccagacaaggtattagctgatcgagaaagagttaaataatctaatcctacactatccaagaatgaaagacgatcgcgtacttcctttaaaatcggcttagcaatcatagtctcttgctcgcttaatttgacgtccttaaagaaatcaagtgctttatcaatagaaagctccgaagcttccgcgatatccttgcccatgactttcactgctaatgctttttcattcaaacgcttgccgtgacaagttgaacaagtaagttcagtcatatatttgcccatcacatcacgcataaacttggacattggtcgtttataacgccgctcaacattggccattactccttcaaatggttgaacggtatcattaacgccaaagtcaccagttacatggaatttcaccggcttagttgagccatgcagaataatgtcgcgttgacgtttagttagtttattaaaaggcttatccatcggaatttttaatgccgtgcaagcttgttccaacatttcagtatagtaattggaagtcttccatggagccagtgcaccttcagctaaagattttgttttgtccggaacaaccaaatcttcgtctactgctaacttcatccctaacccatcacaatcaaggcaggcaccaaatggtgcattaaaggagaacagtcttggttccatttcacccacagtaaagccacactttggacaagcataatactcagaaaagttaagcatttcaccaccaattacatcaacattcatgtagccatctgacaaacgaagtgcagcttcaatagaatcaaataagcgagacttaatgctatccttaacaatcaaacggtcaacgacaatatcgattgagtgacgcttgttcttagctaattcaaaatcctcaccaatttcgtgcatctcaccatcaacaattacacgaacatatcctgcacgttgcactcgcttaaatacttccttgtgttctccacgcttagcacgaataactggcgctaaaatttgaattttcgttctttctggtaaagccatcactcggtcaaccatctgatcaactgattgtcgttgaatcagcgtcccatcattaggacaaattggatggcctactctggcccaaagcaaacgtaaataatcattaatctcagtgacggtcccaactgttgaccgtggattatgtgacgttgttttttgatcaattgaaattgctggatttaaaccatcaattgaatccacatctggtttatccatttgccccaaaaactgtctagcataactagaaagtgattgcacataacgtctacgcccttctgcataaagcgtatcaaaggctaaagaacttttacctgaaccagataagccagtaataactactaacttatccttaggaatagttaaattaatgtcttttaaattatgttcacgtgctccgcgaataacgatcttatcatttgccattaaaattctttccttttcttgatgatttttgcaattccataattgcatcccgcaagttagcagcttcttcaaagtcaagcttcttagctgcttcttgcatttgctcttgcaagttgctaatcattgtcttcttttgcttagccgtcaattcatcaaaattaagatctgcaaaactatcagatttttcttctttttcactcgacggtttagtaatcgaaattacgtcttgaatcggcttaatgattgtcttaggcgttatgccatgctctttgttaaattccatctgaattttacgccgacgcttggtagctttaatcgctgctctcatggaatcagtaatcgtatcagcatacatgattacttcaccattggcattacgggcggtccgtcccatagtctgaaccagcggccgatatgctctcaagaagccttccttatctgcatccagaattgctaccagtgaaacttccggtacatcgattccttcccgcaacaggttaattccaattaagacatcgaacttacctaaccgtaagtcacgcaaaatttgcattctttccagcgtcttaatatcagagtgcaaataacgtactttaattcctaagtccttcaaataatcggttaagtcttccgccatttttttggtcaaagtagtaacaaagactcgttcatgacggtcaatccgtttattaatttcgccaactaaatcatcaatttgaccctcaattggccttacttcaatcttgggatcaagcaatccggttggtcgaataatttgttccaccttatgatctgttcgttcaagttcataatcacctggggtagctgagacatacaaaatttgattaacatgcttttcaaattcggatagctttaatggacggttatcaagtgcagatggcaaacggaaaccatagtcaatcaaggtttgcttacgattacggtcaccattgtacattgctctaatttcaggcatagtagcatgtgattcgtcaattaaaattaagaaatcatctgggaagaagtccaacaaagtatacggtggctctcctgcttttcgtccttccatatgccttgaatagttttcgattccgttggtatagccaacttcacccatcatttccatatcataggtagtacgttgcttgattctttcagcttcaagcaatttgccttcgccttcgaactttttaacctgcaatttcatctctttagaaattgctcccaaagctcgccgcaattgctcgtcattggtcataaagtgcgtagctgggaaaagcgaaatactctcacgctcaccgatcacctcaccggttaacgaatcaacttcaacaatgcgatcaatttcatcaccaaagaattcaattcgataagcatgattagaattgccggctggaaagacctcaactacatccccgcggacccgaaaacgaccgcgttgaaagtcaatatcattacgatcatattgaatatttaccaaatcacgcaacaaggtattacggtcatattcttcgccttcatggatcatcaagacactgcgcgcatactctttaggatcacccaaaccatagatacaagaaaccgaagcaacaactactacgtcattacgctccattaaagctgaggtagtagcatgccgcaactgatcaatttcatcattgattgccgaatccttttcaatataagtgtctgattgtggaacgtaagcttctggctgataataatcatagtatgaaacaaaatattcaactgcattattaggaaagaaacttttaaactcaccatatagctgccctaccaaggtcttattatgcgtaataactaatgtaggcttattcagcttagcaataatattggccatggtgaaagttttcccagtaccagttgcaccttccagaatctgttctttatatccttttttaaatccagcagtcagtttatcaatagcttgctcttgatcaccggctggtttaaactttgatactaattcaaatttgcgatttttttgtcgtttaatcataaaaaactcctcaagaaaaaagttggacaagcatagtccaactttttaattagtatctatattttactaccgcgaacgtgctttcgcacgaaaaatgcttaattatttaagtaaatctgctaaagccttttgataatcttcagctgccttttctgcagtggcaatgtcttttttgtttacaccaacataggccttaattactggttcagtacctgatgggcgaagtgctacccaggtttcatcatctaagaagtacttcaacacattagattctgggaacccttctaatggtgtctttttgccattttcaatagtttctttttgcaagaaatcttgaatcttaagcactttactaccgccgatttcagttaagtgctcattacgcaacttgctcattaattcggccatcttcttttgaccaccaatacctggcatttcaattgcacgggtaatttcataagcaacgccatacttttgccaaatttcttgcaaaccatcaaagacagtcatcccacgtgaagcatagtatgaagcaacttcggcaaacatcaatgcaccctgcatggcatccttatcacgagcaaatggtttaaacaaatagccatagctttcttcaaagcccatcaagaacttagcatcaccagctttattcatccggtcaacttcttcaccaatgtacttaaagcccgtcaaaacatgcttagtcttaataccaaagtcctctgcaatcttaaatggcaaagcactagaaacaactgaagtaacgatctcataatcaggggttaattgaccattttccttcatatgagccaataggtagtaagccatcaaagtagcaatttggttaccagtcaaaacttggaaatcaccatcagtttttctaactgctgcacccattctatcagcatccgggtcagtagcaataatgacattagcatttacctcatttgccaacttaaaaccaggttcaaaaacatcacggtattctggattaggcttaattgtggttggaaattctggatcaatgattgattgacttggcacaggaatcacattatcaaagccgccttgtctgaaagcacgatcataaagcatcttgcctgtaccatgaagtggagtataaatgatctttaacttgtcagcgttggccttaaccatctctggatcaacagttacttgcttcaattcattcaagtaatcttcatcaacatcttcacctattaactgcaaggtgccattagcacgcaattcttttactggtgcagccttgacagcaaaaatatcagttactttttgagcataagcaaaaagtcgatctgcattatctggtgccatttgtgcaccatcttcaccgtaaactttatagccattgtattgcttagcattgtgtgaagcagtgatattaattccagcgaaagtatgcaaatgacgtactgcatatgaaagttctggtgtcggtcttaaatcatcaaataagtaaacatgaattccgtgtgcacctaaaactctggcagcatgttctgcaaactctcttgagtgatatcttgaatcaaaggaaatagctaccccacgctttttagcatcagcaccattttcttcaattaaacgagctaagccttcagttactcgacctacagtaaacaagttaatccggttggtaccgggttcaagacgaccacgcatccccgcagtaccaaaattaatatcctgtccaaaggcatcttcgatccatttttcatccttgcccaaagtatttaattgatcttttaaataatctggtaaattagtagctttttgccattctgtataaatttctttagcgtccatcaatgtcctctattcattaaaagttggatttctaaagcgctttcaaactgttaacaattttctattatctgctattaattataaaacttattagtcattaatttaagctttagacaaaaaaagacatgtccaatacgaacatgtcttaatgaaaaaacgaataaatttaatttttcttgtcttgtaagtcttggtagtaattatatgcagcttgaccagctacactaccttcaccaactgcattagcaatttggcgtaaatctttttgacgaacatcacctaaagcaaagataccaggcaccttagtttccatatgatcatcagttacaatccaaccatggtcatccaagataccaagatccttaaaaggttcagtttgtggtaaaacacccacgtaaataaagacaccagcaactggaatttctttttcggcaccagtttccttatcgcggtacttaacccctgtgactttcatgtcatcgcctaagatttcttcagtttgtgcattccaaatgaaatgcatcttcttgtttgcaaatgcacgcttttgcaaagttggttgtgctcgcaattgatcacggcggtgaataactgtaacgctcttagctaattgtgaaagataaattccttcttcaattgctgaatcaccaccaccgatgacagctacatcttcatctttaaagaaagcggcatcgcagacggcacaatatgaaacacctttgcctgaatattcttcttctccaggcacattcaaatgcttatgatctgaacctgtagcaataattacgatcggtgcacgatactcattgccatcatcagttttaactaacttatcctcgccatcgagttcaacactttgtacgttgccatacttataatctggttcaaacttcatcattgtgtcgtacatcttttgactaagttctggacctttgatttcagaaaaaccaggataattgtcgatagcatcagtattgttcatttgaccgccatagggaccgcgatcaagaacaagaatctttaagttagcacgcgcagcatataagccagcagtcatcccaccaggacctgcaccaataataattacgtcgtatttatcagccataatctatccttctttctacttacttttgataagcaaataatacaatagatttaacttcttgccaactattttgcttatcttttataaacgaatttcaggctttggttctctacccatcattttcttaatttctgtatcaacatcagcatcttcataaagaacacggtagattgcctctgaaattggcatatcaatgcccttttcttcacataattcgtgaacagctttaacagtagtagcgccttcgacaacttgtcccatatttttcaaaacgtaatctaaagtcttgccttcgccgatttgtttaccagcacgccaattacgtgagtttactgaagtacaagttacaattaagtcaccaatacctgacaagcctgagaaggtcattggcttagcaccaaagtattgcacacccaaacgagtgatttctgctaaacctctagtcatcaaggcagctttggcgtcatcaccatatccttggcctactaaaatacctgcagcaatcgcaattacgttcttaacggcaccaccaacttctacacctactaaatcatcgttagtgtagaaacgaacgtagtcattggagaacaattcttgtacccgcttagcattttcttcattagttgatgcacatgcaatcgcggttaaatctttttgagcaacattttctgcgtgactaggacctgaaattgcaacaatcttatcttcatcatctggataaatttcttcagttaaaatttcagaaataagcttcttactgcctggttcaatccctttagttgcagtaactaacagtggcttagcacccgtcttatctaaaaccttgcgtacgtttttagcaacgattctaactgccttagttggcaaaacaaataaaacaagttctgccccatcaagagctgcttccaaatcaccagtagccttggtattctcatttaatttccaatccttcatatagtggctattggtgtggtgagcgttaatttcttcattaacactatcaatgttaccgtaaagagttacatcgttaccattatcggctaacattgaacccaatactgaaccccatgaaccattacctaaaactgcaatctttgtcattttttctctcaaactttctaattaaaatcttttattaattctaatctcttgaatacgggtattttaatccactaccatccaaataccattttggattaacgactttccgccgataaatccataaaataattgtagcaataaagaggattaaacttaatgcctgtgatactcgtattataccaaaaatatacagactatctgtcctcattccttcaacgaagaaccttactacactataccaaagaagataggtcatgaaaacttctccctgcttgaagagatgttttttatgacgcaaggatagaattaagattaagccaatcaaattaaaaaatgattcgtacaaaaaagttggttgataatacgtcccgcctattttcatttgctcaataataaattgtggtaagtgtaagctttgtaaaaaatgaagagtagttggtgcgccgtgcgcctcttgattaacaaaattaccccagcgtccccaaatctgagctgccatgactccaggagcaatgatatccagcattaaaaatggaggtagcattcgtttataacagaaaatcaacagcacaattaagccggcaattaaaccaccataaatcgcaatcccaccattccaaatcgcaataatttgctcgggatgctgtgaataataaccccattcaaaaatcacataataaatacgtgcgccaacataccctaacggtactgcccacaatagcaaatcgacaaaatcatctggaataatttgacgtttttttccttcgttaatcgccatccagcaagctaacataatggctactgccataatgatgccataccatttgacacttaaattccctaaatgaaaggccaccggattaattactaaattagtcattatgcggcaccttattcgtatcttcttttgagtgctctgaaatcagactagtcaaattattatcaaaagtttgagttgcatcatagcccatcttcttagctctgaagttcatcgctgcaacttcaataataatttcaatattgcgtccaaccttaactggaatattaacctgtggaattggtacattgcagatttcacgcgtattttcttgaaaacctaggcgatcataattagcttttggatcccaattaaccaaattaattaccagttggatttctgttctattttttacggcaccggcaccaaataaattcatcacatcaataatgccaattcctctgatctccattaagtgctttaagatctttggtgcttcacccacaacggtattatggtctttttgaaaagcatctactcgatcatccgcaattaatctgtgtcctctttgaactaatcccaaagcagtttcagacttaccaacaccagatgcaccagttaacagcacacccatccctttgatttcaaccaaaacaccatgaatgctggttcttttggctaaacgagcacgcaagtattcagttaaaatactggatatgtaggtagttgactctcttgtacgcaaaattgggattttgtgttcctctgctgccgtagttaattcttccggtacaggcaaagagcgagaaatcaaaaaacacggtgtagccttagtacacattttgttaaagacatgcattctaatatcatggtccaagcgtgccgcatatgaaatttctgtccgacccaataattgaattcgttgcgcaggataaaaatcaaaataaccagttaattctaatccagggcgataaatatcagaaacataaatttcttcatctttgatatattcctgtccttggtaaacttcaaggatactctgattgtcctggatcaatttgcttaatctaacttcatcagccatattaggcctcctaactatttatcaatatctttagtggtgacatttctagctttttttcttggtctaggaccagaagtactagtagccttaaaccactcacgataacttccactacttggcatattatcttgatttttccttccagtaaaccgataaataagccaaatgattaaaatcgcaattacagctactggtaaaagtaaaataaatgccttaaatagaacaaacaataaacttaaaataattagcgctactaaaacaagcgttacaatttccattaaactcattttttaacctaatctggattctcttgactaagcaaccactgtaaataggaataaataaacggttgcaattttccgtccattactccttgagcgtcagctgtttcatgacctgtccgcaaatctttcactaggttgtaaggatggaaaacatatgacctaatttgtgatccccagccaatctccttttgatcgcctttcagagcctgcttttgcttacgctttttttcttcttctaagtgaaaaagctttgctcttaattcattcatcgcagtttcacggttttgcaattgtgaacgctgtgcctgagacgtagtcacaattcctgttggtaagtgcgtaattctaacggcactagaagttttattaatatgctgcccaccagcaccactagagcggtaaacatcaacccgtaaatccttaggatcaatatcaatttgaatactgtcatcaacttctggaatcacttctacagaagcaaatgatgtatgccgtcttttagccgcatcaaatggcgaaattctaaccaaacgatggacaccattttctgatttaagcattccgtaagcatttttacctacaattcgcgcactaacgctcttcaacccagcttcttcaccaggctcataatcgttgatttcaaatttaaaaccagctgtatcacaataacgttgatacattcttagaagcatctgtccccagtccatcgcttctgtaccgccagcaccagggtgaatttccatcaaagcattatggctatcatacttacccgacaagagcaggtctaactcataattatgaaaatcttcttgcagcgtagctagatccgcttcaacttctttttgcaagtcaggatctggttcttcacgcaaaagttcaaccgcagtagtttcgtcttcgtagctagtttgcaattttaaaaatgaatcacgtttttcctttaatcggttggtttcactaattaatttttgcgctttttcctggttattccaaaaatcaggctgcgccatcttgttttcattaatttcgatgctttcatcaatcgcatctaagtcaaagagaccccctaaagtgatttagacgtttttttagttcatctaacacactttgaatttcactaatttccatttttacctaccatcttttattttattgcaaaaaaagggaagctcttaactcccctttttctttattaacgactaagattttgtctaatttcagccttcatgaacaaacgagttacatcaaattcaatatttgaaatcatttcttcaaacattctgtaaccagaatcttgatattcaactaatgggttcaattgaccgtatccacgaagaccaattgattgacgcaactgatccattgcatcaatatgatcagtccaacgatcatcaaccacacgcaagataactaccttttcaaattcaagcatttggctaggatcgcctaaggccttttccttatcttcgaagttttgctcaacaatgtcataaagcttcttcttcaaatcttcaacactaatagtcttgaagtcaattgagtcagttaccttgtctgaagtcaaacttgaggaaatgaaatcgcgtaatgagtcaagacgccattccttgcgttcaccttgagtaaacattgctacttggtgatcaattgttctgtgaatcattggaattaaaacattcttcaatgacttatcagcttcaatgacctgcattctttcgccgtagataatttcacgttgaatacgcataacatcatcgtattgcaaagtttgcttacgagtatcatagttattaccttcaacacgtttttgagcagattcaacttggcgagtaatcaagcgactttcgataaccttatcatcatcattatctgataaacgatccaagaagtccttaactcgatcaccaccaaaacgcttcatcaaatcatcttcaagcgacaagtagaatctggtgtaacctgggtcaccctgacgaccagaacgaccacgaagctggttatcaatacgacgtgattcgtgacgttcagtaccaataactgccagtccaccaagttctttaacaccaggcccaagcttaatatcagtaccacgaccggccatgttagtagcgatagttacggcaccacgttgaccagcgttcatgatgatttgagcttccttagcgtggttcttagcgttcaaaactgcgtgaggaatacctgctttatcaagcatcttactcaaacgttctgaactttcaatggcaacagtaccaaccaaaacaggttgaccattagcgtgacgcttcttaatttcttcaactacagcgtggaacttagagtccaaagttggatacaaaatgtctggcatgtcttttctggcaattggacggttagtaggaatcgtgattacctgcatgttgtaaatttcacggaattcttcctcttcagtcttagcagtaccagtcatacctgacaacttcttgtacattctgaagaagttctggtaggtaatagtagcttgcgttcttgattcttcttgaatcttaacgccttccttagcttcaatagcttggtgcaagccatctgagtaacgacggccttccattacacgaccagtgaatgagtcaacgatcaaaacttcgccatcttgaacaacgtagtcgatatccttaagcatgatgtagttggcacgaagagcttggtcaatgtggtgaaccaacttttggttttcaacatcgtacaagttctttaggccaaagtgttgacaagccttttcaataccagttctggtaagtgaaatagtcttagttggccagtcaatcttgtaatcgccgtgatcttcatcatcgtcggcatcatcatcgctcttgtcttcagtcaaagtcttaacaaagcggtcagcacggatgtaatcactgtttgcttgttcagcttcaccagaaataatcaaaggagttctagcttcatcgattaagatagagtcaacttcgtcgatgatagcgtagttcaatggacgttgtaccatttgttccttgtaaacaaccatgttgtcacgcaaatagtcaaagccaagttctgagttagttgagtaagtaacatcacagttgtaagctgcacgcttttcgtctggtgacattgagttcaagttcaaaccaacagttaagccaagccacttgtaaagttgacccatttcttcttcgtcacgacttgaaaggtattcgttaacagtaacaacgtgtacacccttgccttcaagtgcgttcaagtatactggcatggttgctgtcaaagtcttaccttcaccagtcatcatttcggcgatgttaccgtagtgaagtgcaataccacccaaaatttgtacgtggaatgggtaaagtcctaatacacgcttagcaccttcacgagcaactgcgaatgcttctggtaaaagatcatccaaactttcgcccttctttaaacggtcacgaaattctggtgtctttgcttgcaattgttcatcagatagcttgctcatttcatctgcatgagcttctaccttagctgcgattttttcaaatttcttaagttctcttttatcgtcgttatatagtttctttaaaatatttaccattaaatcggtccttatatgtcgtaaagtctaaaaatacagaataattttaacatgtttatcagcaaaataaaaatattctaaacaaaaaaccccacgctcaaacaaacgcgaggttttgaattaacgagtattttaactcaattattcgttagtttcaattaagccgtaacgaccatcgtttctacggtaaacaacgctagtgccgttagtttctgcatcttcaaaaacgaagaagtcatgttccaacatgtccatttgtaaaatagcttcttctggatccattggctttaagcttacacgcttgttacgaacaatatcaaattcgctaggcttcttttcttcttcttcaggttgttctacaaagaaatcttgtaatcccttttcacgactctttctatttacacgagtcttgtactttctaatttgacgttcgagtttttcagaaacgaagtcaatgctacgatacatatcatccgtggtttcttcggctctcaaaactaagtatggtaaaggaatagtaacttcaactttagctgagtgatcacggtatactctcaagtttacgtgtgcaatcacatcttgattcaattcgaagtacttctctaacttgtttaaccgcttttctacataacttctcaaagcatcagttacttcaatattttctccacgaacattgtactttaacatataagattctcctttcaccgctatgcggtttttctttacaaatttattataccaaaaaatgtaagcgtttcataacaaatctaatgacaaattgaaaagctttcaattttcatttcgggaaaaccctgctgtaaacggtcccgcgcgtgatatagcgtgcgcccggtcgtgtaaatatcatccaaaattaatacttttcctgaaactatattttccttgattttaatatttttatcaatcaaaaagctttgaggcgttttaagccgctcctctttgtttttctcaccttgggcatgactacccgattgtttaatcagaagcggtgtcagcggcaaaatatcagcataaatagcaaaaattgtatcaaactgtcgtcttgattgatgttcaggtgaagtgggcacgggcacataaaagtcatagttagttttacacaaatagtcataacacaaatcttgcaatacttcccgcaaaacataatctccacgccgcttatacgcaaccatcaagtcatgaaaagcagaattataacgatataaagcatgattatgcagaatattttcgccataaatggcttgccaatttcgacaatcgctacacataaagccttgacctagttccttatcacagccagagcagcgattgtctgctaacttttcaaattgttttaaacattgcaagcaaattttactttttcgcgctgttttaaaagaaaaaagttgtgcaaattgtaccggtggagtaaactcctgctcacataataaacaagttctcatctattcatccccttgatctgcttaatactctgtcgaatattcttggtataacgatgataacaatacaaaactaagcccgtttggtcatcgtgagcccgaccaactcgacctgcaatttgcaccaaactagcagcggtataaattgcatcatctgctgcaataataattacccaaacatttttaaaagttacaccacgctctaaaattgtggttgtcaacaataagtcatatttacgatcacgaaaagcctgtactttttctaatcgttgcggatcttgtgcatgaacaccggccaatttaattttattttgcaactttttccgcaaagcttcttgataaagcggaatttcttcaatccgtggtacaaacaaaagcaaaggatgaccactttgaatgacttttttaatctcctgcattaatttaggatgaatttgtcccttccgcaaaaacggcctgataaaaagcctttctcttggtacaggcaataatccaccatgaaaacgccgatttaagcgcaaaatttctaacttccctgttttagcttccaaaagcaaatcgttcgttggcgttgcggttaaatacattcgagtcccagttgttttaaccgcatttttggccgcaaaatgtagttgcggattacctacataaggaaaagagtctacctcatcaattaccaataaatcaaaggcacgataaaacttcattaattggtgtgtagtacaaattgtcaactgctctagccctatttccttaaattcacggccatgatacttaccgatctcaacttgggcaaacgctgccgaaaatcttggaaacagctcatttaccacatcaattcttggtgtagcaatacaagcgcgctgtccttttttcatacatcgagcaatcaactgaaacaacatctcagttttacccgccccagttacagcatgaaccaatgtattttttctttgttcaaaattttgtactaatttatccgaaatattctgctgcaatggggttagtttaccttgccagcttaatcccccgtttttaacatgagaaaaagtattattactgtcttttctaataagccaatcgccctcatttgcacgtcccaagccaatacaaccacgacaataatatttaccattaggcagtcgactattaacttggctgccacagcgattgcatttacctttttcaattactggaattttgcggcatccctcaaatgtgctagaatcctcttgactaacaatccattgacgacctgataatagagtcaaatcttccatatttttacctccctattatctattacgcaaaaagaggcgattattttgtcagaaaaggaaaattttttaactattaaagaaaacggcaccggtgaattaattatcaaaaagagcagattcattgccaatattgcccgcaccactactactgatgcggcaaatgattttattcaaaaaatctctaaaaaatatcgcgatgcttcgcacaatacctttgcctacacgatcggcttaaatgacgaccaggtcaaagaaagcgataatggtgagccatcaggtacggctggtgttcctgaattaaaagcattgcaattaatgaatttaaaaaacgttacagtcgtagtaacccgttattttggtggaatcaaattaggagcaggcggtttaattcgtgcctattccaatagtgtcaccaatgttgttgaaaaagtcggcgtcattaaacgcgttttacaacaagaattaatttttagcgtaccctataaccgcttcgatgaagttgatcattacctaaaacagcaaaaaatttttattgccaataccgaatacggtgtggatgttaaaattcatatttttgttaacgatgaccaacaagctaaacctaaggaagacctaactaatttattggccggacaggttacctttactaatggtgaaaaacgctataatgaaattcctgttgaagctaataattatcatgaacaataaaaagagcatttggatatttccaaatgcttttttgctacttattattttttttactcttcaattgatctggtttttcgtctcctaagtgccaaacttcaattgttggatcagttttactcttttgattaataattttctgaattacatgcatcaaaggatggtatttttcacccaataaaccaattgattccacaaaatactctaaggcaatcagcaagcctaagatcagaagccaagtgccccaagttggcgaaagcaggaataataaagaaataaatgagaaaaccaatgataatgcgtaaatagtcaataccgtctgtcggtgcgttaaccccattcgcatcagctggtgatgtaaatgatgcttgtctgcttctgaaattggctttttgtttagctttctccgaatcattgcataaacggtgtcagtaataggcactcccaaaatgataattgggaccaacaatgaaataaaagttacattctttaaccccttcagagataaaacggcgatcataaaaccaatataaagtgcacccgtatcacccaagaaaatttttgctggatggaaattatatggtaaaaagcccaataaacaggcagctaacataaaacaagcaattgggacatatagctgatgagtgtgcaagaagaaataacctacgatccccatggtagtcagagagatcattgaaaccccatcagctagcccatcaagtccatcaatcaagttaactgcattagttaaagctaagatccaaaaaatagtaattgggaaactccaccaacctagatttacttcatgtgcgatgaatggcacctttaacacattcattctgattccagctaaaaagtagataatcaatgaagcgataaaaatcccaaacattttttgtctaggttttaactccaaaatatcgtcgatcaatcccgtcaaaacaattacgcttgaagcgagtaaaatcgaaaaaatttcatgagtcggaaattgctcacgcaacagaacaaaagtaccgatattaaaagtaacaaaaatccccagtccaccaatcgttggcattggtttcttattaactcgccgggcattaggattatcaacagctcctaagacaaaggcaagccgtcgaataaacggtgtaattgccgctgaaataattactaataagaataattcaacaataattttaaacatatttggctactttccttatttacttgttctaattatacaagtagtcagtattttgcacaaatagcaaaaaagtttggaaaaattatcttccaaactttttaatttatttagcgatcgccacaactcttttttcacggataacggtaatcttaatattacctggataatcaagttctttttcaacctgattacgaatatcacgtgccaaaataactgtccgatcatctgaaatttcgtcaggttcaaccatcacacgaacttcacgtcccgcttgaattgcataagcctgcttaacgccttggtagctcttagcaatcttttccaattcggtcaaacgtctaatataattttccaaactctcgcttcttgcaccaggacgagcactagaaatcgtatctgctgcaacaacaagttcagcaataaacgacaacttaggcacatcgccgtggtgtgcagcaatcgcatttactacaacatctggttcatgatatttacgagttagttcaaccccaatttctacatgggaaccttcaatatcatgatcgatggctttaccaatatcgtgtaataaccccgcgcgaactgctaatttttcatccaagcctaattctgcagccatcgtgcctgctagcttaccaacttcaattgaatgtgacaaaacattttgtccataagaagtacgatatttaagacgacctagcgtcttaactaattcaggattcatccggtgaattcccagctccatcaaagcactttcacctgcttcatagatgtcatcgttaacttcttttctggccttatcgaccatttcttcaattctagctgggtgaatgcggccatccttgattaagcgttccatcgctcttttggcaatttcacgtctaattggatcaaaaccactcaaggtaacaacctttggcgtatcatcaataattagatctattccagtcaaagcttcaaatgaacggatattgcgtccttcacgaccaataatccgtcccttcatctcttcatttggtagatcaacaacagatacagttgtttcggcaactgtatctgccgcgctactttgaatagcatccacaatgacctgattagcataatgatcagctttagcttttacttcttcgttactatttctgatcatctcggctcgttctttgactagttcatcagataattgactaagcacaatcttcttggcttcttcctcatccaacttagctacgtcataaagcttttgccgtctagtttctactaattcttcagcctcagttaattttgcctttaagctagcatactgctgctttaattggtcttccttttgcgtgagtccactttcacgttcatctaataaagaattcttatgatctaaggtatcttcacgttgttgtaaacgatttttctcccgagctaaattatctttcttggaatttaactcatcctcggtcttttgcctaaaatcacgaatttgttcttgagcttcaagaattttttcttttttagtattttctgcactttgcttaacagccgctgctgcttgcttttgtgcattaacttcagcttgtgctgcagcaacctgtgccttagcatcagctaaaatgtggtcagcatcattctgggcattttgagctttttgttcccaagaatgcttgcgaattgcataaccaaccactgaacccaccaagaatgaaacaatggcagttgcgacgggaatcataattgttaacatattattcatgattactatcgccttttttagaattattcacacaacttttatgataaagaacctatctgttcatgtcaattaaatcaaaaaaccttggaaaataaatccagggtttttgacataattatttagcttgttcagactttttatctgtagcagcttctttttctgtcttggcttcttcgcgcttctccttgatcttttctggatcttcacgatcagcaattgacttttcatcaatcccgtaagcttgacgcacttgcttttggatatcttgataaatatctggatgctcttctagatacttcttagcattctcacgtccctgaccaattcgatcactcttgtaagagtaccaagaacctgctttatcgataatgtccttatcagcagccatgtccagtaattcaccactttgtgaaattcccttaccgtacataatgtctacttctgccaccttaaatggtggagcaaccttgttcttaacaactttaattttaactctgttaccaagaacatctcctgattgcttaatctgttcagctcttcttacttccaatctaatagttgagtaaaacttaagagcacgaccacctggggtagtttcaggattaccaaacattaccccaactttttcacgaatctggttaataaagatggcaatagttttggttttagaaatattacctgataacttacgcaaagcttgactcattaatctcgcttgtaaaccaacatgggcatctcccatctcgccttcaatttctgctcgtggtactaaggcagcaacagagtcgactactacaatgtcaattgccccactggaaatcaaagtatcagcgatttgcaaaccttcttcaccagtattaggttgtgacaaaattagtgaatcaatatctacacctaaagcttcagcgtaagcaggatccattgcattttcggcatcaatatatgctgcagtaccaccacgcttttgcacctcagctacagcatgaagggctaccgtagtcttaccagatgattctgggccataaacttcaataatacgaccacgaggatatccacctacaccgatagcagcatctaaagctaatgaacctgttggcactgttgaaatttgcgtatcagctttttcgcccatccgcattacagcacccttaccgaaattcttttcgatttttttaagcgctgcatctaaagcagcctgtttttcgtctttggccattaatgtcctcctatttttcgtacctaataattatactttgaccgccgtccaatttgcaagagaaatgcaaacgaacgttcaaaggattttttaccctctattatttattacgctaaaaatcgccattatttttttacaaaataaaaaaagaagcaaatgcttctttttaatcattcttgacttaatactattttacattgagcccttgaatacgccccatgattggtggaagtaatcgtaacctgagtaaatagtaaagatcaacgcaaggtaaagtaagatagtaccaatgtggaagaagtcaccaatcaataagaaaatgattgataacatttggcaagtagtcttaattttaccaggcatctttgctgctaaaacttgtccttcattttctgctaagatcaaacgcaaaccagtaacagccaattcacgacaaacgatgatagctactacccatgctggagcaagtttcaattcaactaagaaaatgaaagcagtcatagttaacatcttatcagctaatggatcagcaaacttaccaaaattggttaccatattacgtgaacgcgcaatgtgaccgtcaaaccaatcagtagccgaagcaacagcaaaaacgatagcagcaataacacgactccaaacaacagttgagcctgctgcttgaacactagcattcccaccaaaaatgatgattaacataaatactggaatcaaaaagattctaaaaacagtaagtttattaggtaaattcattctaacactcctagattttaattgttgttattatttccaccatcattgccattgttagtgtctgctgatgattgagtagtagatgattgttgacgactgctttgacgagtagcactgctttgagtagttgtacggctttgggtagaactactattggttgtattgttattagtagagcccgtattattagaactactattattttgactagtagttcccttagccttaccaatcaacaaagtaattgtcctgtacgcattgtttgctgtatatgggattttcttacctgcaatagtgattgaagtaccattatcgttgcctaaagtaatcactactctctctgcattgcttggcaaagtcatagtgtgcttttgattagcaagtaaagttgattgccagctattagcattaccattgacttgtacacccgctgaaatattttggttttcaccagcacgcacaactaggcgacggtttttattcaagccagtaactcggtactcattgtcactaaccttagtaaccttaactttattgactactacttttttagctttcttagaagatgacgatgatgacttttgtgatgaaacagttacatcattattatcagcttggttcttttgaccacctgaagaaagacgagcatacaaaacgtacactacaagaattacgataattacaccaagtccgatcgcaattcgtggcaagtaattcttccacaaatttttcttattgtcggtggtttctcgtacttcttcactcttattatcaatcgagttttctacgtactcatctggcttagcttctggtacatcatcgtggtaatcacttaataactccttaccatccaagccaacaacttgtgcatattgacgaataaatgctctaacataaaaatcgcctggaagtttatcaaattcattcttctcaatcgcttcaagatatctgctctgaattttagtagctttttcaatatctgcaattgaaagtcccttagcctctctggcgctctttaatttatctccgatatctgccatatttacctcttcaaattttaatttatcatgttgagtataccataaaattctcattacaacgtcttagttataaaagccatccacctgtaacataaattgtctgtcctgttaaataactactacgtcgatctagcagtgttctaacccagtatgaaatatcactgccattggcccaacgaccaactgggatttcatcttttacctcttgaatcgtatcctcagaaaagaatgcattcattttggttttaaccgcaccaggcgcaattacattaaccgttaagttattggaagcaacttcacgcgcataagcctgagcgaacctggttataccacctttagttgcactatagacgctttctaatgcactacctgcaccaccatagactgagcctaaataaactatacgactaaaatctcgtttcatcagttgtggctctaacaatttagttaacttaattggcacagtaagattaatattaatcagatcagtgatatttgctaatttttcatcacctaaaaaaccatacttagtaattccttgagcaaaaactactgcattaactggcaacaagtttttaacaaaatctgttaactgtgcatcccctgtcgcaaaatccaactgtagcgacataaaatcctggtcaggatgcttagcaaacagctcttgaactaaattttcagctttttgagaattagaatgataatgcaagtataatgaccaaccggcatctgccaaatctcgacaaatatcttgaccaataccgccagttgcaccaaagacaattgctcgcttcaactttatcaaccccttacttgttttctaagtaagcagaacaaagttcactgtctttcataatcttttggcagtagtcataaaactgatcaaaattcatcgcctgcaatttagctatattttgtgttaaattttcatgatctaaattttcttcaattaattcaattgccaaataagacagatcattacttgtcctagcagtgcgtgctaaccattctttcttttgcaaaatgaagttttgtctaataaaacggtattccgctgaatttttcttaattggttccgtcaataccctctttatttctgcaattacttcttgagcttgaggacttacaccaaaaatagtagcaaaatcgccctgcctggtgtaattaacagaaatctgcagcgaatccattaacaactgcttttttctcatttcttcaaaccatggtcccattgcacttagttttgattctaacattatttctaacagaatttgagtcaaatcaaagcttaataatactttcttaaagtttttaaagcgaattcctaaaccaaaggaattagaattacctctggctggcaagacttgatcatgtaacatgcgaaaactaacttgtttttcagctgtgcttttacctttcccgtgcaaatatttttgctgcagctttcctacttgccgcaaaatcgtttgcacttgattatcagaaaaatcaccgcaagcaacaaattgcatcttttctggcacatacttagcctcataaacttgggtcaagtttttcactgtaacttgattaattgattctttcgtacctacaacttcgatccctagattagaatcaccaaacatatcatgcataatcgcattatttacgctccaagttgggtcatcctgatacatggccaattcttgttcaataatcggagcctcttgcgcgatattttccttagtaaaatacggctgccctaccaattcaaacaagagatcgatcattttaggcgtatgctcaattccactacaataaaacattgtttcattaaaagacgtgaatgcattaacgtcagcaccaatatcttcaaattgcgttgacaaatcaccatcttttttggcaaatagcttatgctctaagaaatgagccgaaccggcaaccttttgtggatcactactaccaaagtcaacaattataccgaaaaatcgttgataaaaatgtggctttaaaataatttcggctttaaagcctgactgatattcttttttgataatttttggtgtcatcattttaaaacataactttcattaaagaataaattttgtgcgaaagctactaactgcttaggtgtagctctcctaattgcattttcacgatcaaagtctaaatatcccgagaacaattcatcacgcaacatttgacccatctgccagttttgaccgtctagaccaatcttcatattacgcaaaattgcctttttagcctttttaaataaatcatcttctacttcgccctgaactagtttacccatttcggataaaataatttttcgagccgctgcaatcttactaggatcaagtcctgcactgactaaaaacaaagaattattggcaaagcagcttgcttcaacattataagctgctcccaattgctcccgaatttgcgtaaataatttagatgattgatcacctgccaaatattgcgataataatattcccattacttgaccgcgataatcaatactttgttctaaaccaaagcccattaacaattgagcttgcacatttccttgatcatcctctttttcaatcaactttcttttagctggaatagttagactagctgtttgaaatgatttagttaaaccagtttgttgaaacatagcctgagctaatttagaaaccagattattatccctggtcattcctaaaatttgcattggtacattagctaaattacgccaataatgcatcatagtcgtgctagtcgcagctttgatttcatctagtgagccaataaatgtctccgcataatcaggttgatcctgataccacaatttaaaaaactgctccaacgcataattagatggttgttcaatcagttcttgatattcttctgctaattgacgtttagcatattccaccaaaggttccgcaaaattaggttgattaactatttgtgcaatcacattaagaatttcttcatacgtataatgtggatccaaaatctcaatcggctcaacaaaattggcataataagtcaaaagtatttctttaccaaaaacttgtggcataatctccagctgtaaatcatataattctgccaatcttttttgttgtaaagcaagtgacggataacttaagctgctattcatctgtattcgcgctagcaaactagcataagctaaattatgtttagtcagcggcaaacgcaaaaaacagccaatagcggctgttgtaaactttttattttttctaattgcaatattagttgtgagcattgtttgaattaccttcattctttattggtggcactaaaacttgtcgtggcttagagccttcagatggaccaacaatccctttagcttccatttcatcaacaattctagcagcacgattataaccaattctaaacctacgctgcaacattgacacgctggccgtctgttgacgtcgtactaaatcaacagcttgctcatagaattcatctgctggctcatcatctttactatcagcatttgatgaattttcaccttttttaggaatcattgtctcatcataactaacctcttgttgcttcttaacccattcaattacgcgttcaacttcatcactagcaatataagcaccttgaacacgttcaggtttagatgccccaattggcatataaagcatatcaccacgaccaagtaatttttctgcacctgtttgatccaaaatagtccttgaatccactccacttgatacagcaaaggaaattctcgatggtacatttgctttaatcaaaccagtaataacatcaacacttggacgctgagttgccaaaatcatatgaattccggcagcacgtgccatttgtcctaaacgaacaatcgcgccttcaacatcgtgaccaccaaccatcatcaaatcactaagttcgtcaactacaactagaatataaggtaacggcttcatcactggtttagttttatcacgattgttttcagcaactttttgattatattcactcatgtttcgcacgccaccagccgcaaatagcttatatctgcgctccatttctttaacaactttgcgcagtgcatttgcggctagcttagcatcggtcaccacagggatcaataaatgcggcacaccattataaactgaaagttcgaccatcttggggtcaattaaaactaatttaacttcttcaggccgcgccttcattaaaatactggctaaaattgtattaatcgctacggacttaccagaaccagttgaaccagcaatcaataggtgtggcatcttagctaagttggcagaaataatgcttccagttacatctttacccaatggtacatccatcggatcgcttttggctttattatcttgatgttccatcacgtctttgaatgaaacaacagacgttgctcggttaggtacctcaattccgataaagggcttaccaggaattggtgcttcaattcgaatatctttagccgcaagcgccaaagccaaatcatccgctaagtttacaattcgacttaccttaacgccaacagctggctggacttcataacgcgtaatagttggtcctaaaatagcttttttaataatcaccttaacgccaaaactcttaaacgttgattgcaaaacttgggtatttttcttaattaaatcacggtcagtactctgatcagtcgatttaattggatcaagtaagcttaaaggtggcatcttataagctttattgactggcgcatcagtttttagttcaccatgatcgacatcggctaattcctgctttaacttttgatcatcttccgcaaaagaatgtgacttaggtagttcctttaccccgtcatcatgttgtggtgcaatttgaatttgcggttctggatcaggtgtggtctctggctcaacttctacgtcttcagccgtcggcgttacatcgtcatcagttggatcggcagggtcaaagtctgctacattaggaaaaatcggtttatcgtcatcaactaaatcttcgtcttgttcctcttttttctgacgccgcttttccaaaacgtcattatatttatctttgacctttaccccagcttctttattctttttgatgaataattgactaactgtctggaatttttcgataattgttctaaatttaacatcaaaaaacatcaaaattccaattggcagcaataaaatagcaaaaacacggacaccgatttgccctagtagtggataaaaaagttgataagctaatgaaccaattaatccaccaccaatgctctcagtgactccagcacgaccaaactccgcggccattgcatgccaaaaagaattcaggaaattactgttaactaattcatgttcaaaatacaagttacattgaattaacagaattcccaaaaaagcgattgctaaccccaagctacgcttaattgttaagtgaatcggttgattatagattaaatttactaggccaaaaagtcccagtaaacctgccgcaaacaaataagaatccccgaagaacattcgaatcaaatttgcgatttgcttacccaaaataccgaaacggacaaaagccagccccgctattaaaatcaagactaaaccacaaatactccaattaagattttgctttttgtttgcttttcgcttattgtagctctttttggcctttctttgtttcttttttgcaggcatgtactcacctgattaattatcgaattcagccttgaagttcaagttaaccggctgacccaaagttaattgggttgtttcatagatcaaggtctcaagttgctcaactaatggtcgagttagtaactgccaatctgaattactaatgtcagagccatcaccatggtaatcttttaattgcacgatttgatgaatcaagccgcttgcttcaaacatagctggtgcaggaattacatcatattgaatagcaacatcatagtaactaccattttcttctgaatgctcatcgtcaccgctaacatctaattttctaattcctggtctaacgtcactaattggtttggtatcttcatcaactaaatcataatgaaatgcctgtacgataatatctgtctgtttttcaaaatccattatttattctcccctagattacgttcatatctttcaggacgatcatagtcatcttttaacttgtcattttcataatgatgggttgtttccatattaggaaaaccttgctggcgtaaagcttctagcaaaaccattgctacagaattagacaagttataacaccgaatgttatcagacattgggatacgtaaattacggtcatagtattcacgcataaaagtttctggcaaaccagttgtttctgtaccaaaaacaaagtaataattcttgttaggatcagtataatcgacttgtgcataattttttgatgagaatttagaaattaaatacatctcatcattaggccctaaagtcttcaaaaaggcattcaagtcatcatgtctgcgtacatcgaccttatcccaataatcaagacctgctcgcttcatttttttattatcgatttgaaaaccaagtggttcaatcaaatcaaggacagtgttagtccccgcacaagtacgagcaatattgccagtattagctggcatcaatggttcatacaaaactacatgattagtcattcaaaaaactccttatcaaaaaaagcgtagcttttaagccacgctttaaaactatctagtatttattcgctttcgtcatgatctgcatcccccgtggtcgaagaaacagcattctcttcaaagagtttagactctcttcgataataattgtacacgcgagacacaataatcttcaagatcgcataaattggaataccgaaaactacaccccataagccccagacggcactagcaccaatcaagagtaaaattgttgtaattgggtgcatttccattttattccccattacccatgggctaagaattcttgattcaattgtttgttcaatagcaaaaacaattaagaccttaattaacattgaacctgaagtcataattgaaattacaattacaggaatcattgctaatggtgtaccaaagtatgggattaagttcataaacccagctaaaattgccaaagccacgccatatggtaaaccaattagaatgtaacccaatgagaacatcacacctacccaaaaggcaacagtaatttgaccacggacatatgaagcaacagcatagttaatatcatataataatttgctaaaactaggttgccatttttcaggtgcaaacttggtaatatatggccgcagttgatgaccatcttttaacatgaagaataaaataaacggtgcagttaacaaagtcatagccaccattgtaataatgctgacggcagatgaaatattgccgatagttgcattgatggtactttgtccagacttaaataaggtcttctgcgtattatcaatcatgcctttgatactgcctttaaatgaatgtaaacgcggatcttgcaacgcattttgtgttgcattaaccgcatcattccaaatatgaggccagttctttatcaatgaattaatctgattctgtgcaattggaaccaagatattaataatccaaattaatgcgacaactactagtaagaataaaactataattgtcaccactcgcggaatcttaaattttctttcacaccaatcaacaaccggattcatgatatagtactgaattaccgctaataataatggcggtaaaattgcactaaagaagatccaggcaggattcaatacaaaagatactttattaaagacccaaataattaaaaagaatagcaggacgtttaataaaacaatactaaaacgattatctaagaaccattttttaaaaacagttccacccctatgttggttattttccatctattcatactaatttttaaatgtgttcataaacaatatcatcatcaaccttaaaattaggtaatggttgatcaatatccggatcaaagtagatcgcattagcaagtggcgtcttagaaacgggacggttaaagaacaaggttgcgtgtcccaatgccttcatgttgctctctaccatcggaccaacatagtttgcaacataggtttgaccatcaacagtgattgtatcgccttttttaaaaacaaaaccactaactggcgtctcagtactgaatttttgaatgacagaaacgtcttccaaatccttattagcaccctcgccaaataaaattaccatgccatctttattatcgacggcctttttaccaatttttttaatatttgcaatccatttcataatataatctctccttaaaaataattttagcataagaaaagctgcttaaaaacttaagcagcccaaaatcggcgattattttttgctcaacaggaaatcgtgtttttaagcgtctaatccgctttcatgctatactttattttagacttatttttatttagagatggaggcccacacatatgaaggttttaatcggaggttacaccaaaaaaacttccaaagggatttatgaattacctattaccagtgcagcaaatgatgcccgtttaggcaaagctgagaatattattagcgttggtggtccaacttatttccgaaaagatggtaatttaatttttactgttaataacgctggcgataaaggtggaatcagcgtctttcaattaagtgatcaaggcgcaaacgaagttgaccactatttaactccaggctcttcgccagcttatgtaggaattaaccgcaccaaaaagttgatttacactgctaactatcatactgctgtcttgtccgttttccgctacaacgacagtggcaagctcgatctagttgatactgtaactcacaaagctgaaacgttgggtccgcgtcctgaacaagttgacggtcctcaccctcacttctttgatgaaaccccagctggtaacttggttagttgtgatctaggcaatgataccgttgatttttatagattagaaaatgatcaattaaaacacattgctcaatataagtgcgaaactggctttggtacacgtcatatcgtcttcagtaaagatggcaattacttctacgttgtcggtgaactttctagtcaaatcaatgtcgttaaatttaacgaagacacttgggactttgaaaatattgctacttataagacaattcccgctgattttactgaccataacggagctgctgccttatatattagtcaagatggcaaatatgtttacacttccaacaggggacataattcaattgctgtcttcaaagttaacgacgatcatactttgagcctggttcaacgtgtatccacttttggtgacttccctcgtgattttaattgggataaagatcagcgctacgtcgttgtcgctaatcaaaatacagataatgctactctttacacaagaaacgctggtactggtagcctaactcctattcaaaaagaaatttccgtaccagaaggcactcgcgttcttttcaccaaatagtaattagcattagtaccaaagtcatggcgcaatagaacgtcatggcttttttattcctacaacttaaagtaaaatagaaataaatgaaacaaaatataagtcatgtggtaataagtcaaatgaaaggcgatgatatttgttctttttgatcataaatttgagtatatgaaactaagccttggtaaaggttgatttttttaatgttaaacttttgtttacttttaaatttagaccaatttttgaaattaagacctcggtgtcctgtacagtttgtcatctttgagcaatttaaagataactcgtactaattttcttgcagttaatgtgcaagcacgtttatgcggcgagtagacagcttcatcatacttcttttggtaatattttttgaaaacaggatcatgtaatcttgctagattggcagcttcaatcaagtaatatcttagatatctgtttccagtcctggccattggagtatgttcgttgctgtgatctcccgattgatattgattccaggttaggccggcatacttagccagctgttcttctttatcaaagcgatcgatacttccgatctcagcgataataccagctgtataggttttgccaataccgggaattgattccagaattttgctttctggtaatgcatcaacgatacgatcaattgctttttctagatctttaatagattcattaaagctttgaatcatgttgtaatgaacagaaagcactgcatcaattgaatcagtcattactttgcctaagcgatatgaacctctaacagctttcttaattgctttagccaaggtatctggatcggaaaagcgtcctctgcctttaacctgtaagtaagaaattaagtcttcggtaggcatatccgcgatctcatccagagttttactatcggttacaatagacatcattgtagcaccgaaaagaggagtattaatcttatctttatcgacagtgattagtttattaacccgataatataaagcttcaatgaagtgctgtttggtacgagtcagttcttgaactaattcatatctggtacgcgttaaacgctctaaagcaagatagttgtcttgtctggcaatgcttactcgataatgtccaaagcttagatacaaagcaatgtaataagcatcgagaggatcagttttactttcttcaaagactttatgaaacctgctggtttctttggggttaattacatcagtctctacattgagcttttgtaaatcttcgtcattttggaaaaagtaagcaggatgaaaactgtaaatagatgtagcttccatgccaataatgatttgatcatagtgtttattttgagctagatctaaaatttgttttttcagttcactagcaccataaagatcattgacaaagctatcgttaattaagcgtttgttttgatcttctgaatcaagtgcaacgacctgtaaatctttagaactaacatcaataccgacaaataatttcattggaaatggcctcctttctttcaaatttctgatcatagattttgatcttcacatgttaacccctaattacagttcttaagttcaatctcgccagtataagtattcactggttgcttctttgaaagctgcacctaatcccaattgctcaaggactagcaaaaagaagcaatcaatacagcatgtgagttagagcataaaggaactgtctgggtggcagacttataaagcagacaaaactgcaggaggtgataacctagaccagttgaccaaagccaatgacaattagaggctaacatgtgaagatcaaaaagcaaatactaatttgattaattatcacaatatgactaattacaatttatataatacgagaaggtgacaaagtgaaaagaaaaataattcgaatattacttttcattcttggcgggatattagggttactacttctgtataaactctatttaaattaccgtcctgaattgaatttattacttcattttgatcaccataatgaagaagtactcgttaacatggtccgtagccatggtattgaagacttagcctttttatttttacttaatgcgatctgtgtagcaattcctggcttatccaacggaatcttttgtgttctcaacggaatcctttatggccctgcctggggatttattgttaattggatcagtgacattttaggccaaataattttaatggaacttttgcaaaaactctatgacatgaaaaagatgtctaacagtaaagtttataagttattgactggattaaaatcaccaatgcttggattaattattggatatatgattccatttattccgagtgcgacagttagctatgtcaacattatgattaataaggagcaacgtaaaaaacagctaataccaatcattatcggtgtcatccccttcgcttacttatatgcttatggtggcgattcaatcttgcacttagacggaacacgattgattaaagttgtaatctcattcgttgtcattgctttaattgcagtagctattttgcttagtctgagagcaatcaaaaagcgtacaaaaaaagcttgaatttactcaagcttttttattatgcctagcatatttaaactaagttagcttcttctaacagttcttcgacccaagttctcttgattttcttcatccctgttttgagagctaacttctcaggtaatggcatctcttgatcaactaatttcttcttgtcagacatgtagtacatcgcacgaagcaattgacgaatatcataaattgagtcaaatacttcaggtacaccacggtcaacgttaagcaatgtataaacagcttccatggcagttctgacagaatattcggtggtaaagacagtgtctctagttggtgattcggcaaaattgccaataaaggcaatattaactgatccttctggaacaacatctggacggtccccatcatgacgaggcataaagtaactagtgatatatggcatgtaaactggtacggtattcatattttcttcactagccaattcgctgatttgactctctggcacgcctaagtgatagagcatttcctcggcaatttctttaccagtacagtcaacgactctcttcttgatgtaattaccctcagtatcagaatacaaagcataaatccaaacaacgatttgatctggattctggctcttaaagtgaggttgacggtgaatagtaaagctaagttcccaattagagtcaacaacagtgataattccaccagtattaactttaccatcgtaaaggctgcgcttagtcaagcgttcaaagtatggagctattttcttattttccaaggtagctgtagctgatacgaaccaactacgctctggcaagttttcacagaagacatctggatgaccaaagtcaggatcttgtttagccaaattttcccataatttccatgaagagcccttgtcgtgagtaattggtgctggggtattttgatcaccataagtagaactttcagtgattgaaccgttagtcacaaagacaatatcatctggggttaaatcaatatcactttgctcaccattcttggtcatcacgatcttcttggcaaccttttgcttgccctcatgatcaacaaccacgttatcaacgtgacaatcatattcaaattgaacaccgtgatcttttaaatatgccaaaagtggcttaaccatggactcatattggttatacttgttaaacttcaatgcggtaaagtcaggcaaaccatcaatatggtgaataaagcgcattgcataacgccgcatttcggctgctgagtgccatttttcaaaggcaaacattgttgcccagtatgtccagaaattagtcttaaagaagtcatcactgaagaattcttcaattgtttcaccttggagttccttttccggtgtcatgattaacttcacgatttcattagtgcacttacctagaccatattgaccatcacttggtaagcgatcaccgcgattataaattagacggcaattggatgagttaggatcttctttatcaagccaataatattcatctaagtatgatgcgccagggatttccaaacttggaatcgatctgtacatatcccacaaacattcaaagtggttctccatttcgcggccgccccgaaccacgaaacctgcattaggacgcttagcaccatcaagtgaaccaccagctacgggtagctcttctaaaatatgaatattttcacccttcatttgtgcatcacgaactaaaaagacagctgcagaaagaccggctaaaccactaccaataatataagcagattttttatctacgcctgcgggctttttggcatccgcaaaagcctcataattaccattggaatagtacataaagatatcctcttttctgtataagtatagtttttaacattacactttaattataaagaaagcggttactagatgcgagttttttagaagttttagctaataactttagaattctttattaattagtttctgccacagttcttgcatatcttttggatcattcaactcaattgttttacatttttgctggctaaatggatccggaaaatttaaataaaagcaatttaaggcttggcgtgaaaacccatcttgaattccatataaaggatcaccatataaggggtgtcccagataagccatgtgaacacggatctgatgggttctaccggtaagcaagcgtaactctaccaagctagcacctgtaacctgatctaggactcgatacgcggtttgagcgtcctttccatctgccactactgcacgtttaactccactaccctttttgccaatcggttgatcaattaaaccagttaactcattcggagcaaaattgccatgtacaattgcatgatattttttgacaaatttctccttgccaattttactaaaacgagcatgggaaattgcatttttccccaccaatactaaaccagatgtatctcgatctaatctagtaataacatgcggcttcaaatttttctgtcctttttgggcaaaataacccaacaatcgattgaccaccgcatcatcatcttcatagcgtgagggaattgacaacacacctgcaggtttgttaactacaagataatttttattctccaacacaattgatactggattattcgatggctttaaaaaatcatttttcttttcttcaccactgataaaaatcacttcatccccagcacgcaaattaaagctagtatatcttcttttatgatttactaaaatcatgccatgatggtgtttagcattgtttaacgcttgatgcgaaaaaccattttttaacaaaaaaggacccagctttttggggtctctttcttgcacaattagtttaaataaactagtcatttttttcattatctccaataaacgcattttgtacgcgtgaccaaaaatgatggtggccaaattgatcaaactgaatcgaatgccgcgaaattcgatattcaatcttcttagcattacgtacatcaattcttgctccatcaactgtcatcacaaaatgatctgcattaggaacaatcgaaatccattgatcaggcgcaatcacaattggtgatgacaaagttctaaaaactcgattattaattgaggcaatttcagtcatttgcaacgcttttagccggggatgaattactgcaccacctagtgatttgccataagcagtcgaacctgttggtgttgaaacgcaaagaccatcgcctcgaaagttttcaaataattgatcattaatgtacacatcggcctctaatgtatgtgaaactcttttaactgctgattcattgacggctaaatggtaatgagtttcacctgattcagtgagcatctttatttctagtaaaggatacttcgctggttcacccttggttactgctaaagcatcaaccattttttcaatatcatagttacgccaatcagtataaaaacctaagtggccagtatgaatcccaataaagcgcacagaatctacttgattttcatagcggtggaaggcattgatgagggtgccatcaccgccaacagtgatcactacatcaggatatctagcatcaaagataaagcccttttcctgaagcagcttcttaagctgcgcaactgtctttaacgtttcatcgtagttattatgcgctattgttactttcataatttttctttgcccttatttttggtaaaaattttctgagcttcttggacctcatccttaattgacgacatttcttcgtctagtctataagcggcttcagccgttgattttaatctagctgaaatgtcatcaggatagacaccttgatatttgtaatttaaagtatgttcgacagtagcccaaaagttcattgccatagttctaatctgaacttccgcaattaattttttcggaccttctggtaagtaaaccgtatagttaatcaccatgtggtatgaccgatatccactcggcttagcattttgaatataatcacgctcctcaacaacttccatatcatctcgagcatgaatcaaatctactaccttataaatatcgtctacaaattgagtaacaatcctaatccctgcaatatcttgcatatcagtctcaatgacatcaggactaattactcgccgtttcattttttcctttatagaatcaactgtctttacccggccaattacaaattcaataggtgaatgttctcccttagttaaaaagccttgtctaagggaacgaaatttaacctttaactcgcgaacagcttcgttataaggccacaagaagttatcccaatctaattccatgagaaaacattcctttcttaagcaaacaaactcattttaccatataattaagttaaacagttcggaggaaaaacagatgagtaaaaatcgagaaattgaagcaaaaattcttttaaataaaagcgtttatgatcagatcactgccgcttttccaatcaaaagtgactttacccaagaaaattattattttgatacagcagatgatttattaaaaaatcatcaaattagcttgcgtattcgaatctatgctactcacgcagagcaaacaatgaaggtaccggatcctaatcctgtacaaaagaatttccatgaagtaattgaaattaatgataaattaactcacgctcaagctaaaaaattagtagcaaaaaagcattttaaattcactggtaatattggcgcatatctagataatcattttgccaatgaccaaaaaaagctacatcttttcacctggagcaaaacccgcagaattttgatgaacgggccacaaaactgtgaattaactctagatgctacgtcttatccagataactatcaagattttgaattagaaatcgaaaatactaatcctgctttaattcaaacagtattaactaaacttgaacaagaatatgactttgaacaaacggctgctaacactaatcaaagcaaaatagctcgtgcaagcgctcaccaaaaatagtatatagaaaataaggcatattttttgtcacttattttttttcttgctaaagtaactaatagtaaatcaccaaagaggtcgagattatgtttgagatttttctattcatcaatccaatagggatttattgttatgacactgaaaaacagattcgtaaaaccgttgatgaattaggggtcgacgtttgttatcactatattcccattgcaaatgtttgtttaatcaatgatgatgcgattcgccgacgcaaagatgaccagaagttgcctgatattagtaatttttctagagcaacttatgaagcattagaaaattaccacgcgattaggctggcctatggcaacaaaaaagcccgtcaatacctgtatgaattacaaaaaaacttgagcaaagatgcttcagcttatacacctgagctgcttaagcggatcgcaaacaaattacatatcaaggatgcggatattcaggcaatcaaacaaactgattacctgcgtacttctattgaagaagatcaaaaactagccaaccaatggaatattaaagctactcctaccaccgttatctttaacgaagacaacgagcaaaatggagtattgctagagggaccaatcaatcaacaggatttagttaatctaatgcttccagattgtcaaaagtgtttttcagactatttacctgcggagcatcatttacgccttatctaaaggcgttttatttttgcaaaaaatcactcacccgatctctttcacctgggttacgccaagtagcaaaaactttatcaggtaaatcatcaagagttaatttgcgttcataaagcatctctcctattttcaatcctaactttgttttttgcataatttgctggcgtaaatattttctttgagttgcaatgttcaaagaatattctttttttgaatggcttaaagcgccaaaaatcttttatccccaattcatcaaggacaaatgatttactttgataaaccaatttattagctaccggttcttctaaaacattatattttaagcaaaaacgatttctctgtggattaatttctaaatagtaattcccccaagctttattttgtcgaaagaaaatcaactgtgtgcgtttcaatcgccgtttcaaatagtgtcgctgtcccacaatccaaatatcttttacaccaattttttgataaagctgatgccgatggttaaattcttgttgactcaacggcgcacattgaacttcaaacgctaacttagcagttgctaagacatctgcacgcaattgtccttcagctaatggaatctcaacttctgccggaaaaccagctgccgtcaaagctgacttcaacagcattttcgattggtgatgctcctctttttcacccattaaattactgtacttcacaagatgcttaaaaaaggctgctttttgctccgacataaccaaaatcacttttttattgcaatgtggacagtgataattatcacgattcaatttcttttgccttgcattaactaaacatgcttcgtcaactgcaaggactaatttcttatttaacatggctgcatacatttttctcacccatgttttattacgtaaaaaagagacggaattttgtcccgtctctttttctttaaagaatcttaataattagctgcttttaaaaagtaatgtcgaatctggcctaaagcattttgcatcaataagcatttgcctgtttcttcaactacacgcatcttatcactatcgaccttaaaaccaaattcgttggctattgtccacgcatctgctggtttaagctcctcatattcttcatcaagaaatgccaaatttaagaaatattgtccatgcaagtaatacaagctagaagctaaatcatttgccttaaggttatcagctaattcaattagactacctaaatcatcaaaatagtaagcctgagtcttgcgcgatctccaatcagttggctcattgtttttatcatcttggttaaaaaagttgtgagtagctggtccttgaggagccgaatttgaattcgtactctcctcatctaaatcaaagaaactttttgaatcatccgaattcgttgatgattgctcatccttaggaaagctatcacccattagtttccttaaattctgtgcatcgtccggcttaactttggtgatcatcaaatctaatcccccattattaggcattacttgaaatgatactggatcaccattggcaaattcatggtcttcatcgacctcatcaagaattttatagaagaagtcttgaatcttttgtctattacctaataaatcaagcattcccatcccacgacgagccaattcagctttatcaattcgaactctgatagtattcttatcaatatgatctacctgcacaggatctcacctccatgaattaatatatctattgtagcgtatttttcgtttaaaataaaagtgttagtctcaacaaaagccttaactaacacttttcaatcattttataaatctgcaatcttttgtgcttcagccaattccaaccgacgaacttttcgtggcaagaatcgacgaatttcatcttcattgtaaccaacttgaagtcgacgatcatccataatgattggtcttcttaacaaactaggattcttttctactaaatcaagtaactgatcaattgataaatcgtctaaattgattcgcaattgttgaaaagctcttgagcggatagaaatgatttcctcagtaccattttcagtcatccgcaagatctttaataattcttttttagtcaatggttcagaaaaaatgtttctttccttgaatggaatattatgtttttcaagccacgctcttgccttgcgacatgaagtacaactaggagagacatataaatctaccataaaaatcacgctcctcagaacaaatatttgtatacgtttctttactcatagctagtataccatataagcttctttttcgtaagtgcttaatttatcgtttacctctgctatttacttaatactaaagataaaacgtgaattatttgtgaagatttcgttcgttttgtttaaaattattaaaaataaaaaaagagacatcacagtctctttttgcaaattaaaactacttgttcaattttttcattaaattattaactaatttttcgttgtcttcagcagtttctgatacataacaagcttcgttagctaattccttaatgtcagcagtgttcaatttcttcattaagcttctgatacgcaaaattgaagttgcactcattgagtattcatcaagtcccattgaaagtaagattgggaacatagtgttatcaccagcagcttcaccacacataccacaccaaataccgttttcatgagcaccatcaatagtgtgcttaatcaaacgaagtactgatgggttatatggttggtacaagtatgacacattatcattaccacggtcagcagccatagtatattgaattaagtcattagtaccaattgagaagaagtcaacttcctttgcaaattgatcagctaaaacggctgcagcaggtacttcaatcatcataccgacttgcaagtcatcaccaatcttaacgccttctttagcgagcttatctttttcttcagctaaaatttgcttagcttcacgtaattctgctaaagtaccgatcattgggaacataattcctaatggaccgtatgcagatgcacgaagtaaagctcttaattgagttctaaagatatccttgtattgcatagaaagacggatagcacgaacacctaagaatgggttcatttcttctggaagatcccagtaatcaaggtgcttgtcaccaccgatatcacaggttctgataatggtttgtttaccattcataccttcaataacttccttgtaggcatcaaattgagcttcttcagttggaaagtcactagagtccatgtacaagaactctgttctgtacaaaccaatggcttccgcaccattatcctttacacctggcatatcattaggtgtaccaatgttagcagcaatgataaatttcttgccatctgcagtaactgatggttcattcttaagcttagcccattctgccttttgcttaaggaatgcttcactcttttgcttgtaatcagctacttgagcgtcacttggatcaataattgcatccccgtcaagaccatcagcaattaacatatcgccgttcttaacatccttagtaattgagtcagtaccaacaacagctggcaattcaagtgaacgagccataatagctgagtgagctgtacgaccaccaatatcagtaacaaaacccttaacatactttttgttaagttgagcagtgtcacttggagttaagtcgtgagctacaacaattacttcatgatcgattgaagcaggatttggtaattccttaccaagaaggtgagccataatacgctttgaaacatcacgtacgtcagcagcacgttcttgcatgtaaggattatctgtcatcccttcaaaaatagcaataaacttcttagcagtctcatcaagagcagcttctgcgttgatctttgaatccttaatttcattctcaatggcaccagtaaattctgggtcatttaaaatcattaagtgtgcttcaaaaacttgagcttcttcatcgcccaagctttctttagcaatatcatgaatcttttcaacttcagcagttgaagtcttaattgcatcgttgtaacgagctacttcagcttcaacatcagcaattgaagatttagagaatgaaagatcaggctccacaagaagatatgctggagcaatagcgataccatcacttgcagcaattccttttaaagtcttggtcattattcagctaaaccttcttttttcatagtgtcggcaattgcgtccaatgcgtccttttcgtcatcaccttcagcagtgatagtaacatcagcattttgaccaacaccaagtgacataacacccatgattgacttcaagtttactgacttaccgttgtattccaagttaacatctgagccaaactttgaagcagcttgtactaaaagagtagctggacgtgcatgaatacctgtttctgcaatgatatgaaaatcgcgtttttccattataaatatctcctttaaattgaaaaattaaactggtaataaatacccattcgagtattagattatcatgtttttacagattagacaactgcaatgtaacagtttacattatttattcatcggtattcgtagcggtatacacaatcgcgccgcctctttctgccctaccggtaatatattgtctttttccataatttctaatagtcttttgaagatcaaacgcatcttttggctcaactttatactcttttatctcacctgagactaattgatctagaattttctgataatccaaaaatatcaccacttttttaaaattttataatttttccactattaattctactatttatattcaattttcaaaaatattaatattttgtttgcggtaacaaaagcatttcttacaaaaaataagtgtttgagtcttagcacttgactaccaagagtgctaataatataattttggtacagttgaaaagaaaggcggtactatattttgctttgccaaaattgtcatgagcggcccgcttctattcaccttttcactaaggttaatggccaaagccgcgaaatagatttatgtcaacactgttatcaagaattaaaaaatcaacaaggaaatcaaggaaaaatgaataataatgaattttttggcgactttgatgatttattcaacgcattaaacggaaataacaacaatgccgcaaacaataataatgaaatgagaaataacgaccctagaatgcaaatggggggaggcgctggtaatggtggtcaaaacggcagaagcctacttgaccaatacggaacagacttaactgcccttgctaaaaaaggcaaaattgacccagtaatcggtcgtgataaagagattgctcgggttatcgaaattttaaatagaagaactaagaacaaccctgttttaatcggtgaagcaggtgttggtaagactgccgttgtcgaaggcttagctcaagaaatcgtagatggatcagtaccagcaaaattgcagaacaaacgaattatttcattaaatgttgtttcacttgttcaaggtaccggtattcgtggtcaatttgaacaaagaatggaacaattaattaaagaattacaacaaaacgacgatatcattctttttattgatgaaattcacgaaatcgttggtgccggtaatgctgaaggtggcatggatgccggtaacattattaagccagctttggctcgtggcgaattgcaattagttggtgctactaccatcaaagaataccgcgatattgaaaaagactctgctttagctagacgttttcaaccagttgaagttaaagaaccttcaattgacgaaacaattcgcatcttaaaaggtattcaaaaacgctacgaagactatcaccatgttcactacactgatgaagccattgaagctgccgcaaaactttcagcacgttatattcaagatagatttttaccagacaaggctattgaccttcttgatgaagcaggttctagaatgaacttaaccattccttatattgataaggataaaatgcaagaaagaattaatgccgcagagcaattgaaggaagaagccttaaaaaacgaagattacgaaaaagcagcctactaccgtgatcaaattgaaaaatatgaaaaggttaaagatcaaaaggtagatcctgacaagtcccctgttattactgataagatcatggacaagatcgtagaagaaaaaacagggattcctgttggtgatattcaaaagcaagaagaaaaccaactgcaaaatctagctgctgatttaaaggctcacgttatcggccaagacaaggctgttgaaaaagtagctcgtgccattcgtcgtaaccgaatcggtttcaacaagtcaggccgtccaattggttcattcctcttcgttggtccaactggtgtcggtaaaactgagttagctaagcaactggctaagcaaatgtttggctcagaagatgcaatgattcgtttcgatatgtctgaatacatggaacaatactcagtttccaaattaattggttctgctccaggttacgtaggctacgaagaagctggtcaattaactgaacaagttagacacaacccatatagtttgatcttgcttgatgaaattgaaaaagctcacccagatgttttgaacctcttcttgcaaattcttgacgatggtcgtttaactgactcacaaggtagaacagtttcattcaaggataccatcattattatgacttctaatgcaggacaaggcattaagaacgctagcgttggctttacagcagaaaacgaagatgaagctaatgaatctgctagaaataatatgagccaattctttaagccagaattcttgaaccgtcttgatgatgtaatcgaatttaatgaattgactaagccagacttgcttaagattgttgacttaatgttgcaaaataccaacaatatggttaaggatcaaggcctacacattgatgtaactgctgctgcaaaagataaattagttgaagatggctttaatcctgccttaggtgctcgtcctcttcgtcgtaccatccaagaagagattgaggataatgtggctgatttcaaacttgatcatgcacaggctaagaatttaaaagccgatgttgttgatggtaaaattgtaatcagtgatgaagcaaataatgaataggatttaataaaagacaaagtccaagttataccaaaagatttcgaagcaatattagaaatcttttttcttaaaaataaaaatatgctactcaatttgaggtatactaaattagaagaagtaaagctaacagaaacaggtgaattccatgcatttaattgatgtaaccaataattactctgatttggttcacagtcagctcaacactaccgatgcaaactatgttaaagtttattctcttggtaatacttcagttatttatactgaaagtaaggattctatcggtattgtacttgaaaaccatgaccgtcgtgttcgcgaagatgagattgaattcgtaatcaagcgtttaattaaagattatgattcttcatacactttgactgtagacaagagtcgtcatgtaatcgaaattcacgttgacaagtaatccaaatattgttgtatcaaaaaaggaggattgattcattcaattctcctttttctttttgctttaaagtttttctgttaattcaacatctggatatttgtcatggaagaaacgttccgcaaattcattttcaaataagaataatggattaccataacggtccttaactaataagttacgagtattagacatgcgtgggtcaagctgttccggatcaatccagcgcgcaacacgatgaccaatactgttcatttcaacttcagaattatattcattcttcattctgaattggaacacttcaaactgcaattgaccaacagcaccaagaatatactcatccgtttgataattgcggtaaagctgaattgcaccttcttggactagctggttcatacccttatggaatgatttttgcttcatcacgttcttagcagttactcgcataaataattcaggtgtaaattctggtaatggtggataaacaatcttgcgcttaccagcataaatactgtcaccaatttgaaaattaccagtatcgtataagccaactatatcgccagctaccgcatcagaaacttgtactcgctcgcttgacatgaattcagtcgcattatttaaacgaattggcttatcagttctagctaaagttacatccaagcctttcttgaattcaccagaaccgactctaacaaaggcgattcggtcacggtgatgaggattcatattagcctgaatcttgaagacaaagcctgaaaattctggatcttctggacttagctcctcatccccattaactgtgtgactctctggtgctggagccaaatcaacaaagctgttcaagaatgtctcaaccccaaaattggtcaaagctgagccaaagaagacaggagtttgatcacccatagcaatcttctcgcggtcaaacttgttcccagcttctttaatcaaatcaatttcatccagagtatcctggaattgaggatcttgactaagtggctcactatcaggcaacttaccatcttgatctaatggtaaaaagcgatcttgatcatttttgcggtaaagctcaacacgattattagcgatgtcatatagaccctttaaagtttgacctgaaccaattggccagtccattgctacaccctcgataccaagcaaatcttccaattccgcaattaaatctaatggtggacgtccatcacgatcaagcttgttcataaacgtgaaaattggaataccacgttgcttaacaaccttaaacaacttctttgtctgtggctcgatacctttagcagagtcaattaccatgacagctgagtcaacggccattaatgtacggtaagtatcttctgagaagtcctggtgtcctggcgtatccaaaatattgatacgcttgcctcgatattcaaactgcataaccgaactagtaacagaaatcccacgcttcttttcgatttccatccagtcactagtagcaaaattgccagttttacgtgccttaaccgtacctgctttacgaattaccccaccaaacaaaagcatttgttcagtaatcgttgtcttacctgcatcggggtgagaaataattgcaaatgttcttctcttttttactttatctgctaactctttgtccattagtcctcgctatcttcttccttttttgattcatcaatcgttaataataccgtcaacaagcgtgaccccttcatccttctagtggtcaaagtcatcccatcaccaatatcaactgttaacttttctcccttagctggaatcacttttaaagtattgatcacatagcctgctatcgtatcaacatcttccatttgaagattagtaccaaattgctcattaaaatcatctaatggcatcttaccgtaaataatgtacttatttggagctatttgattaaaaagaatctcagtgtgatcaacctcatcatcaatatcgcccacaatctcttcaaccaaatcttcaattgtagctaatccagttacaccgccatattcatctgtcaaaattgctaattgtcgttgcgtttgctgcatttccatcaacaaatcgcccagctcggcagtttctggtgcaaacagcggctcagtcatgacatctttatagtcaagattatcaaaacccttttgtttagcctttcgtaaaaccgttctgatatgaataatccctacaatcttatccttatcacgttgataaacgggaattctagaatatggctcacgaaggatttcatctagattgtcttgaaaactgacttctcgatcaaccatgaaagcatctgttctaggtaccattacttcacgggctgtcttaccctgaaagtccaaaataccttctagcattgaaaattctgtatcatcaattttatgactttcatgtaaagtaacaatttctttttctaaatgatctttagtccccacttttttatcgccggataatctattttttaagcgaccaaacagagttcccgctccaggatcactattcattttcgtactctctttcttaaaaaagttatctaaatatagctattatagcatagagccaataacaattatgttaaaatagcacataagactaggaggttcgtcatgaaaaaaagtcatgtcttactcgtttttacatttcttttgctaattccctatatctgtagcttagctattattggaatcggctataatgcattagttttacattcagctgaactttatcgcacattaatcggctcattagttggcgcaatcattatgtttgctgtcaaggctactattcaacggcctgttgatttattagctgttcaaaccaacgatggcttactgaagcagcttttacgtttcttcagtatcagacgacgctactggcttttagcagctaatattatcttagactttgttctttgctttgctgctacctacataatacgtgctcttttaacacttgatcaaatcgtaggcagctccatcggctttgttttgttaatcatgtttgtttcaacttgtcttggcgcttatgttgaatacgataacctgtcaatcgaccctgagcagcattaattacttgctggccttcaagtacattacttgagccagtttttttgtatccatgtcaagatcccaagtaatatatggcgtgtcactgtcacccaaattttcatgtacttcaattccgctagcaactacttttttggcaaaatttggcacggtactagtcaacggtaagttgaaaaagactaaagtttgattctcttctacttcctccgctacctctgcagctggtaattcaaacttcattaaacccgttggcacttcatcttttgctacatctgctaaaacgccataccaatacataaagctgtcctcacctgataccactaggacagaacgcttattttctaaattatgatcagctaaaaatttttgaaaagtttcatcattttccatttgctgattagcttccataaagctcttttgagcattcatcaaaccagctggaaatggacaaccaataaataatcttgattcaatatttttcttcattttttctcctaatattctactaattcgtctaaatcaattatttcaccgtttaaaaaggcatcaatctcacctgatgaaaaaccgtgactaaacaaatatttttttattttaaaattgcgttcaatttctggaagatttctaaaacgcttgtaagccttaattccttgtttcttcaaagcttctgtttgtgcattctcatcttctttaagatccattgcatcaataataacgttactaatcccgctatcaaagccatgcgttaataatttagtacgcatcttacgctctaattcacgctgtgaaatcttgccaacttgatggctcatcgacttaatcacgcgttggcccacttctagccaatcttcttcatcaatttcatctaacttatcctgactaatttcaggatcaacgcctttttgcgtcaactttcgtaataaacttttagggccatcagagccaacacgcaaatcatttttgataaacagcttggcatattgacgatcatcaagatagcctaattcattcaattgactaacagcactattggctgcttcatcagagatttcgtgtttttttaaatattgcagcacctcaaagatggtcctaggctcgtaactcaaaaaatgagccgctaaatcactagccttagcatcagcatcaaattgcctaatcttttcaacctgctcatcatttaattctttacctttaagcagcacaaattctgccaacgttttctctccggcagaaaaagcatattttccatcaataaaaatattatagcgacctggccgtttttgtgcacttactttggttatgatcaacttgtttcacctcgcatatttttctacatccatgctagcaaattttgctaaagcttgctaagaactttttccaggtagtacaattaattgaacacaatttagtttttagtagaaagaattaacgatgaacagaaaatttacccataataaaccaaaacatgaaaaagacgtcatcatcactattaagcgtttaggaattaatggtgaaggaattggttactacaagaaaaagattatcttcattcctggtgccttgccagacgaagtagtagttgccaagattgttaaatcatatccacactacatccaaggcgaactggttagaattaaagaaaaaagtccagatcgcgtagacttccctgaaggtgttgatcccgagattggtggcttagaattagcgcacttgtcttacgacaaacaacttgaattcaagaagaacaatatgcttgaatcattacgcaagtaccatcctcgtaattacaataagtataaagttaaaaatactatcgctgctcctgacccatggcattatcgcaacaaggctcaatatcaaattgaaaaagatcatggtcaacttaagcttggactttttgctccaaattcccaccgcttgattgacttaccaaagatgccaactcaaagtgaagacacacaaaaaacggaacgtaaaatcaaggttttaattgaaaaattgcatgttcctgttgccaactatcgtcgtcatttacctggcattaagaccgtagttgtccgtcaatcagaagcaactaaggaaatccaggtaaccttgattacgatcggccacaagattaagaacttaattcctcttgctaaagaaattatgaaacttgatcatgtagtttctgtctatcagaatgaaaccgaatggcagaatccacaagtttggggaaataaaaccgaaaagcttttgggcaagaatcaaatcaccgaagaaatcttaggtaaaaaattcgccttatcaccacgtgccttcttccaattgaacccagttcaaaccatcaatctttactcagaagcattgaaatacttagacctaacccccgatcaaaccttgattgatgcctatagtggtgttggtaccttaggtattttggcagctgaccgcgttaagcaagttgttggaatcgaaaccattccagaggcagtcaaagacgcacaacataatgtcgagcttaaccacatcaaaaacgctgattatattcaaggcagtgttgaaaaggttttgccagaattacaaaatagtggtgttgcaatcaatgctttaatcgtagacccaccaagaacgggcttagctaaaagcttgatcaaaaccctcttgcgggttaaacctgaaacttttgtctacatctcatgtaatccctcaaccttagctcaagacttagttttacttagcgaggcatatgatgttcgggtcatccaaaatgtagacatgttaccacaaaccccacgctgtgaggcaattgctaagttagtgctcagaaaagatagataaatccaacaacctagtcttgggctaggttgtttttgtatataaaaaagcggctactggacaatcctgtcccttagtagccgcaatttcaagtggatgaggtagctcatcaattgatagtcacgatttttagttgtttggtatgtatttaaacaatggcattatcgcaaccaatattaacattcacttgttcgggtctttacataaaatgtaacttttaataaattggagtttttgcgaacagccaatgataattaatcaaataatttttaattaagctatttatggctgacacctctacgtatagagaatctttcaagtttccaataataatacaattctggagataaaaacttacttatatttttttatagttgttaacttttatttctacctcttccacactattcattatatctagttgtgaaaccgtttacaagaactaacccacatatttttgcaaaaatctttctacttgttgtcgatattgctttggatacattggataagacaaagcatgccctgcaagtggcgcaagccaaatttgctttggagcagctgttgccgcataattttgccagaccatcttagttggcacaaagtgatccttgccgccatgaataaataaaaatggtcgcgtatttttatttaactgagcaaccgcagaagcatcttttaaataaaagccatttttcactctattaattccactaaccaaatcaactattggaaaccgtggaaaagccttcatatgaaataaattttgagcttgatagttaatttcacctttcacggttgaataaccacaatcttcaataaaagctttcacttgtggtggcaaaagcataccgcttaccatcattgccgttgcaccacccatgctttgacccataattacaatttgggcatttgtaccagtttgatcaattacttgatagatccaacgcaaaatatcatctttttcagcccagccatagccgatatacttaccttcgctgcgcccttgggcacgtgcgtctggaacgagaacattataaccaaaatcataaaacattttggcaaaaccagccatactatctccatcactcataaagccatgtaataaaattgcggtttttttggcatgttgatcaaggtactgggcgaacaaagttatgccgctatcagttttttaagtccatgttttcttagaaaaatctctaaaccaaaccttatcacgataaagtggatccttgcctgataattctttggagtcagcttttttattaaacggtgtcatcgccatcttgaaaaagtactcgcttgccgcaaacaagccagctccagcaattaatgcggaagacaataatagtttctttttcatcttttaacacttccaaattcaattatttcacttttcattttataattaaattgctgaaaatttacaatccttatgacttaattatactgaaaaatgcgcttaacagacttacttcaattaatcgatgacctgaacctgaatactaaattttatctaaagcatgatgacaaactacttaagtggggaaaactcactattgccgaaggaaaatgtctgctgctacccgggcaaacagcaatgaccaaacaaaaattgattaaattagttggccgcatgcatggtcgcggcatccccttgttaacggtcattgaccaaaaagaatattccattttcggcctacagattcgcgaagatactggacaagcaattttaatgtaaaaaaagagcacaaatgtgctctttttcttattcttttacgcggtattgacgaatatgatccttagtaccagcaaaataccaagtacctacttcatcgtcgctagttaattctaagccatcctcaggatctaacaaagccgtattgaagacgtcttcatattgcttaactgtcagcttcttccgccgatcaagcattgcttgatcagctgtaggatcaacttgtttttcatatccttcaaccaacttgccactataaaactcagccattgcacctgaaccatatgaaaacaggccaattaatgagccagcaggtaattcaccattctctagcaaactaagtaaactcatataaagtgaagcggtgtagatattacctactcggcttgataattgtttagcagccgcaaaactacgctccaacttgatcattgttgcttgatcttgcccctcaatcgcaatattattagcttttaagcccatcttagtaaaaggtaaatgataagtaattgcatcaaaatcactagtctttaatcctttttgcttcttataatcagtaaaggtcttcttgaagaaatccaagtaaacttgagtcgaatacttgccgtcaactaaagcggtgcgagaataatttggtctccagaagtcgttaatatcttcgctgtaagctgaatgaccattatttagggctaaaatgcttgggtcagctttgatgagcattgccacgctaccggctccttgtgttacctcaccagcagtattaacaccatagcgagcaatatcactaccgatgacaattgcggtttgttcaggatgtacccgaacaaaatcacgtgccatcattaaggatgccgttaaaccaaagcaagcttcctttacttcaaaagttcttacttctggcttcaactttaaggctgtttttacaaataaagaagctgactttgattgatcaatactactttcagtcccaaaaattaatagaccaactttgttcttatcaatcttgtcaataaactttaaagtcgcattaattcccattgaaactgcatcttgcgtaatatccgcaacactcatctctctttgaccaatgccaactaaaaacttatttggatcttgctttcttgcgttcgccaaatcgaccatatcaacgtacttgtctggcgtaaaaagtccaatttgatcaatacctacttgcattatttttcctttcttatttttgctaaaagctccttagcatgactttcagaataatttttttcactaatcatcgcagctagtagctgcttgcgctcatgttcgtcatcggttaattcagtgactacgtttctagcctgcaatttcatatgccctgcttgaatgccgacagtagaaattgccagtaaagcggctaaattgtttgctagagcaacactaacaatgatctcggctaatgttttactcgtgattttttgccccaaaatagcaaagctttgccggacatcatgccgagctttaattgaaccgccaactactccaatcgccattggcaaagtcaattcgccaactaaataactaccctgcatcgtccactttgataaactgcgatattggccatcatgattggctaaaactgcagtggctgcttcaattgcccgataatcattgcctgtcgcaatcaatacggcgtcggcaccattcatgattcccttattgttagttaccgcacgataaggatcgtcaattccaatttttcctaatagagcaacacgttgtgcaacttgcatcccaccaatcgtttgtggatcaatcttcactttagccgtggccaattggctaggataatttgataaaatcgcaaataatttttcatcaacaccagcataattttctaatttagccgctaaaaattccaaaatcgagttggttttattcgcgcccatcgcctcagctggatcaaccaatacttttaagtaaagcaaatcctctttctgcacagcagttatttttctagtaccaccactatgacggactaagctggaaaacttttgattagctaattcgactaagtgcggaaattctttttctaattcaattaatgaaaaagaattgttgaccttcaaaacgatttgaccataaatcccttgtcggtcgctgctagctgtcacaccaccatttctagcaaagatactagctccatgattggcggcagcaactactgaaggttcttcaacagccattggcacccagtatttttgtccattgactattaagttttgtactacacctaaaggcaaacgcagctgccctacaacattttcactcaattcatctagacgtctcaaaaccgtatcatcgatttgccctaatgcaataccttcgtcctgtaataacttacgtctagcttcaggctctaattgataaaatttcattctgcattctcgatttcataagcaatcgcctgaccgccaccgatacacaaagtaaccagggcacgtctgccttttctcttctttaatccactaattgcactagcaactaagcgtgtacccgttgcacctaaaggatgacctaacgcgattgcgccacccataatattcaatttatcagttggaatttgtaagtcgcgagctaccgctacactttgggctgcaaaggcttcatttaattcgataatatcatagtcatcaaaattatgtcccgtcttcttaagcagttttttaaccgcataatatggagtataacccatcagtgcaggatcaaagccagcttccgcaaattcacctaacttggcaattggcgttaagcctaaccctttcattttctccttagttgccagaactaacatacttgcaccatcagtcaaaggagacgagtttccggcagtcacttcaccatccgccttaaaaacaggctttaagttactcaatgcctcaagcgttgtatccggacgaattggttcatcatgatctaaactttgaccatcaatctccacatccaggatctcattatcaaaaaatccggatttaactgctgcagctgcctttttatgcgactgcaatgcaaattcatccatatcctgacgactaacatgatatttttctgctacgttttcggcagtaattcccatatgcttgccagaaaaagcatccatcaaaccatcgttaagcatagtacttactaggtgatctgctggatcatttttgttttcttttttaacaaaataaggcgcattagtcatgctctcactaccgccgacagctactagatccaaatcgcctagttccatctgtccttgagctagacgtaaagctttcagacttgagccgcagacttcattaattgtaacggctgcagaagcttcactcatccctgaatgtaaggcaacttggcgagccatattctcacctaagccggtatccaaaacattccccataaacagtgcttgaacatcagctggcttaatattgcccgccttcattgttcctttcaaggccattacacccaaatcaattgcagaagcatccttaaaaaatcctcggtacttgccaaaaggtgttcttttagctgcaacaatataaatgtccttcatatattttctctccataatgtgtattttttaacaaatatgataatagcaaaaaaatattaagaaaaacataaaaagactacgccgcagcgtagtctccctaataattaagcttattttttattttgcttaccttcggcttcaaactttttgctcaattgcatgatatatgcccgcaattgttccttaatttctgggtgcttcaaaccatattcaattgaagtttcaaggtagccttctttgttaccaacatcatgacgttcgcctttaaagacatgagcaaagacacgttgagtcttgttcattgtatcaatcgcatcagtcaattgaatttcaccgccacgacctggtttttggttagccaaaatatcaaaaatttcaggtgttaataagtaacgaccaataatggcataatcactaggtgctttatcaatatcaggcttttcaacgaatgacttaacattgatcagtcctggcatgatctcattttccggttcgatgacaccatacttagaaacttcttcatgtggcacaggcataactgcaattgtagaagcatgcgtcttgttatagcgatcgatcaattgcttggtcaatggcaccttatcttccattaagtcgtcgcccaacataactacaaatggttcatccccaacaaaactgcgagcacggaagatggcgtctcctaaacctgctggatgcggttgacgagtgtaatacaagttaacgcctaaatcagtaattccttcggttaggcgaagcaattcttttttacccttttcttccaaatcttgttctagttctggattagaatcaaagtgatcttcaattgggcgtttgttcttgccaattacaattaaaatatcttcgattcctgactttttagcctcttcaacgataaactgaattgttggtttatcaacgataggtaacatttccttaggtaaagccttagttgcaggtaaaaatctagtacccaaaccagctgatgggataacggcttttcttactttcataaaagcacactttctatttcaattttataagttcatcataacaaaatatgcatttttcagctaattagtttttcgtcttttcttttgaatataactggcaatacgaccagcagaatattcaacttgtccaacacggtttcgcacaatagcagcgttaacaccaacgccaaataaaaataatactgctgcaatattcaaccagagcataaagatgataaacgtaccaacaatgccataattctcccaagtaatcgggaaatggtgtaaatagaaactaaaaagaaatgatagggctaaccagcctacaacagttacaaaaactcctggccaaattactctctttttgagttttatattaggcaaaacatagttcaaataccataatgctagcatcataaccaatattaatactggatagcgataactaaagatcttgctaatttcattaagtggtagctgaaaaatcggtcctaaaaagttgagtacttgttgcccaaaaaccaaggccaatgtagcaattgtaaatactagaatcatcaatcctgtaaaaacaaaagtaatagttctagtccaaagaaaattaagcattgataattttaattcaacttgatgaaccccataaagtttattttctccaagacgaattgcattaaccatatttgataatgaccaaactgcaaacacaataccaaaagaaatatagcctgttgatgtagttttcaataaagaatttataattggcataatgaatttagacacttggtctggaaaaaccaagttcaaatattcagcaataggcgcagtatcaatgtgaaacaacggtaacacgttaccaatgataataataatcggaaaaatagaaaacaaaatgtagtaggcaataataattgaactagcaaatatctctccttgagataaggtggttcgtaatgtagaaataaattgcccaatttttaaaccaaaatggtttttaccatttttcatccattatcctaatcatccatctcatcaaagtgagggatgtacttttctaagccatcgtaaggatgctgcagggtcaagatcttaggaccatcttttgtaattgcaaaggtgtgttcaaattgagcagcattagaaccatctggagttgcgtagtaaacccaatcatcgttaggatcatcaacagtacgttggtcgatgtgccagtcgccaccagcttctaccataggttcacaagtaatagtcatgccttcacgcaagcgaagaccatgacctgccttgccccagtgaggaacttctggatcttcatgaattgatggttgaataccgtggccaattaattcacgtacatcaccgtaatgattttcatcttcaacataatgttggatagcagcaccgatatcaccaattctgttacctaaaacagcttggtcaattccgagatacattgcttttttggttacttcaattaatttcttatcagcttcggaaatttcgccaactggataagtagtacatgaatctgattcataaccgttcaaattgcaagttacatcaaccttaacgatatcgccttcctttaagatgcgatcttttcttggagtttggtgggcaatttcatcgttaaccgaaatacaagtaccatacttataaccttcaaaaccttgttctgaaaggcggccgccacgacttgatacgaagtcttgacaaaactcttcaatttcccaggtagaaatgcctggcttaatcacatcacgtaagccttcaaacatagttgcaagaagatgtcctgaagcttgcatgcctttaagttcacgaattgatttaattgtaatcaaaataatttctcctttataaatttttatttagtttcagatatttctattataccgttttccaaaatacttttaaaaggtcgggtttttgtagaatcaaaacaaaactctagaaatacctgaaatattttcccggatttaaaattgaagtgcaacactaagtgttaaacaaaaaggccatgaagacctaaacttgaagtgacgaaaaatcaagaaaggaagatctttatgaccaattcaaattctagcatttctaagcactatcatcaattaaccagcgtacaacgtggacaaattcaagcaatgctggattccggcataacttcccgtactgttatcgctcaagaagtcggctgccataagtcgacaatcagtcgcgaaatcaaacgcggaagtgtcctgcaaagagacagcagctatttattgtatgagcactattacgctgatactgcacagatttattatgagaagcgtcgcaaaaactgctatcagcgcaatccattgaagcattatgctgtctttttgagaatgctctccagacgctttaaagctaaatttgatgccaccagcatcgatgagttcgttggtgaattcaaaaggactatgccaggctacccttgtcccagcacaccaaccgtctatcgctatattgatcagggcttgctggacataagcaatattgatctgcctatgaagctcaaaagacgcaggaacaagcgtcatcacagccatggcggtcacgctttgcacaagaagcatcttggcaattccattgaacagcgtcctaaggaggttgaagacagaaaagctccgctgcactgggaaggagatctggttaaaggcgtcagacgcaagaatcagcctgctttaatgactttgactgaaagaaccacacgctttgaagtagttatcaagattcctgactatcgggcaagcacatgccaaaggctgcttcaaaaggagattgacagacatcctgcctggtttaaatcaatcacgtttgacaatggctctgagtttgcggatatgaccaagatcaagggctgccagatttactttgctcacccatattctccatgggaaaggggcaccaatgagaactgcaatggtcttttgcgtcaattcttccctaagggcaagagcatgaaagacaagtcaaaagcttatgttcaacaggcaactgatgccattaaccacaaatatcgccgaatcctccaatatcacacagcagaggaactcttcaagcaatatatctcttcataacctaactgttgcacttaatttgacaattcaggcctgaaatatttttaaagtttgctaaaactaaacgtttttgcaatagtttcatgtataataaggtgtcgtataatgcagtgaaaggtatgaaaaatcatgaaagcaagaattgtttatgccagcatgactggtaacgatgaagacatggctgatattttagaagaagatcttcaagattatggctttgacgttgaaacaagtgatgtcggcttcactgatgccaatgactacttagatagtgatctttgcatttttatcacctacacctatggtgaaggcgtaatgactgatgaattggcagacttttatggggagttaaaagacttagatctaacaggcaaacattttgctgtgatgggttctggcgataagacctacggtgaacacttttgtgaaaatgtttttgactatgaaaaagcattcaaggattgcggcgcaactgaaattactaaacccgtaacaattgaaaatgcgccagatgatgatgcagtcgctgcaatcgatcaagctgcaaaggaaatggccgataagttaaatggctaataacaaaaaagacgtcacagctgttgatcaggcacaaatacgccgtctaggtcaaaaattaatcaagcgacaccgtaatctttgggtttacatggttttcggctttgtcgctgcattaatcaataccttagtcttcatggtcttacactcatggtggcataatgtgatggtaatttctaacaccatcgccttcatcgtctccaacctggcatctttctggtttaaccaaaaggctgtttttatcaataatgtcgatcatgaacacagcacgtggcataaactaatcgtctttttcacttatcgcgtcatcagtttaatccctgatacattaattatgttagtcggcttatcctggctgcatttaaacgcattactagtcaaaattatcgaccaaattttagtcggtgtattcaattacttaactactagatcagtctttcaaaagcaagaacatactatgattgaacgtgcaaaaatgcgcattcaagaacaaaaaaataaaagagacagcaaaaattaaaaccaatgtcattaagttaagacattgacaaattgaatctaatctctgtagaaccgaatcattatgatttggttctttttttgcataaaataaaggcgaaaagaacctaccttttcgccctctgattaaattattaaaccttcaaaattattgccagaaagctggtgttaattatgaaagcccttcacagaaatattttagatcgtcttgatcaaattatcaatgatactggaaagcatattcatgattttatcgatgatcctcatgccttcactaggaagcggtttttagatgcagctacagtcattaaaactactattaatatgcaaggaaaagatttgaccagtgagttgtttagagcttttggccaaaaagctattaaaaataacgataaagtagtcagtacttccgcttatgtccaacgcaaaggtcagctttcacccgcatgttttaagcatattctaactgtatttaatcagaatttatttaatatccagttatttgatcataaatatcgtatatttgccattgatgggtctgattttaatcaaatctggaatcctaaatcagagaatatcgttggaaatctcaatcataaaggaaagccatattgccaaattcatgttaatgcactctatgacctgttaaataatacttatcaagactgcatctttcagcctaagtcaaagatggatgaacgtaaagccgccattcaaatgcttaaaaagctaaattgcggaccatatatagttactatggatcgaggttataccggctttaacatgattgaaaattgtaatcgcctgcctaactgttattatgtcatacgtactaaaacgggatatggcgcatttaaggaagtagctgagttgcctaatcaagagtgtgataaggatatagcttgctgggtgactacctctaattattattatgaaacccataaggctacagaaaacgttcatttggttaaccatcattaccgtcaatatataaaatatcggtctaaaaataccaaagatggcagctgggactttggagagttatgtacaataaaatttcgtgcctgtaaatttagaattaatgatcctaaatcaggcaaagaagaatgggaagttgttctaactaatctaaatagagccgattatcccttaaaaaggatcaaagagatctaccatttgcgctggggcattgaaacttcattcaaaaagttgaaatatgctttaggtagcgtacagtttcattccaagcaggatagatttattgaaatggagatctatgcccacatgattatgtttaacgcagtcagtcaaattgatgctcaagcatatgtaccacaaaaaaactgcaagtatcaatatgcgatcaatttcaaacagtcatgttttgtcatccaggctatgtatataatttcttcttcaactgaaatctttaaaaagattcttattcaaattagtcattacacaattccgatcagaccaggacgaaaagacaaaagaaatctcaaacccaaatcagctgtatattatttatatcgtgtagcctaatttctaaacaagatttgggtttatttggcatgaaaaaagatcattcaaatgcgataaatcgcaaatgaatgatcttaaaagtccaagtcgataatttgtcaatgtcttaacttaatgacattgaaattaaaactgtctctttatttttttactcaaaatcttttggtttactttcactatcttgattaaagtaataataaatatcatccataattcgatcagctgcatgtccatctccatatggatttttggcattcgccatccgatcatattcgtttttgttttctaacaaagctagcatttcttcacgcaccttgtcgacttcagttccaactaacttcaaggtaccggcctttacgccttcaggacgttccgtcgtatcacgtaaaaccaaaactggtttacctaaactaggagcttcttcttgtacgccacctgaatcagtcatgataaagtatgaacgtttagctaagttatggaaatctaccacatcaagcggctcaatcaaatgaatccttggatcaccaccaagcacttcattagccactttttgtactcgtggagataagtgaaccggataaataatttctacatcaggatgcgaatcaattacttgccgcattactttaaatactcggcgcattggctcaccttgattttctcgacggtgcatagtaaccaaaatcaccttattaccaggagtaattgcgtctattacctcatgatgataatcttgttgtacagtctgtgctaaagcatcgattgccgtatttccagtaacgaaaataaaatcagaatggtgattttccttcagtaaattagccttactcaattcggtcggtgcaaaatataaatcggctaaatcatccgtcatctgccgattcatttcttcaggatatggtgaatacttattccaagttctcagacctgcctccacatgtcccaatgtagtttgctgataaaaagtagctaaagaagccgcaaaactagtcgtcgtatcgccgtgaaccaagacaatatctggtttctcttctttgatcaccttagataaatcaatcatcactttagaagtaatttcttctagagtttgattttggtgcataatattaaagtcataatctggtttaattttaaaaatatctagcacttggtccaacatttcgcggtgttgtgcgctaacgaccgttacttcttcaaaacgatcatctttttttagtttcaaaacaagtggtgccatcttgattgcctctggacgcgttccaaaaacagtcattaccttaattttcctcattaaaaaattcctccgcttaactattttactatacctgattttagactatcttgcacccgctttctgtgttttaatggaagtattaaattgaaagttggtcgatgcatgaattcatcattactattattaattacaactggtttaattattttgattggaactttttgccttgtttttggtatggacaaaaacagacccgctaaaactagaaaatatttactttatactgcactaatctgtgttttcctagtttggggcttaattactgcaattatgcttcaacccttaggataataaagataccttttggataaccaaagcatgtaaaaagcctgcaagaccaatacttgcaggcttatttctatgaccccggtgagatccgaactcacctctacggtttaggagaccattgttctatccagatgaactacggggtcaaacctaagattaactttaccaaaaaaagtggtaatagttaacctttttttagaattgtggattaaaaaatgttttcggatggttggtatcagcaatcttatcagctgctttaacaaaaggcatccaaattagcaaagcaacaatcatatttaaaatgcttaaaacaattgcacgccaatcataattgcaagccagaaatgggccaataactggtggcatgatgctaggtactgccacttgaactggattaaccaatcccataatgctaacccaataagaaaaggcaacattaactagtggcgctaatacaaatggaattagatacactggatttagcactacaggcaggcccaagagaattggttcgccaatgttaaaaattcctggagctagtgagattttggcaattgtgcgataatcactgcgtttagaaaacattaaaatcgccacaattagcattaaggttccaccagcaccgccaaaccaggcaaagacatcaaatgagccacgtacccatacatacggtggaatatttccattactaatcgctgtgatgttatcattttgagcagtcatccaaattgaatccaaaattggtgatagaacccctataccattaattccaaaaaaccaaaataactgcactaataaagtaatgacaattaccgtaccaaagccttgtccccactttactaatggagtttgaattgtggtaagcaaccaatttccaaaatatttaccggtaagaatttggaacaaataattaattccgcctacaccaaatattgcaatcattgcaggtaataaagaatcaaaagcagcttgttcagcatggggcaagttcgatgtcacatgcaaaataatccttgctttatagcaagcataataaataaaaaagcctaatgagccaaacaaaatagcagtaaagaggccagtagttgagaactgactaatgtcaaatgcattatgaagtgtaacattatcaccatgaaatttaatcttagctatattggcaatgcttagtgcaaaagaagataatgccacaattgaagcagcaagtctatttccttcaaaagcttttgctagttgatagcctaaagccaatgctaagaaaaaggcaaataatgaaaatgttcctcgccaaactaaattactgattgctaccaatggctgcatcgcaaaagcaaaggcataccagcctaaatgatcatgagctgcttcaattaagctcttaattaaaactgctaatgatcctgccattgtaattggcattaatgagacaaatgcatcccgtaaagcaactagccatcttatctgaccccatctactagctagcggcaaaacatagtcctctagccatctaactaaacgaatcatttctttcctttcaagtaatgtggatgatatcccttgttcttattacgtttcttgcgttttttagttttatttttcttagtcgaagtcttaatgggctgctctttagcctgcttcttttccttcttgagtttaggcttttcagttgttaaatgatagcctgcaaagtagacacgctctatttgtaattgatctgccaataatttcttcaaatcacgaaaatcgtgatcatcgcctaaagtaaccacataaccttcagcgttcattcgacctgttcttcctgcccggtgcatgtaagtattagtctcgctcggaatatcaaaattaatcacataggtaaggcctggaatgtccaacccacgcgcagccaaatccgttgccagcagcaatttcgtcttaccagtagctaggtcatttaaggctttttcacggcgttctttaccaaattcattagctaataattcgaacttagtcttagtatgcccaaaaataccagcaaagcgcatcatcgttttatttgaatcaaagaacaaaattcccttaaagtgatccaacttagtcattcgctgcaaaaattcaatcttgtgttgattgtctacttgcaaaaaataatgtttagtcgctgaagcttgttcatttctgacatctactaacaagaaatgacggttaaaaacttgctccgcatcccgtgtaatctcagaatctgttgctccaaataataagatttgactgtctggacccagattttgccctaatgctgataacaattccattttagtaaattctaaaatatcatcggcttcatcaataatcaaagtcttgatctggtttactttaattcgaccacttgagaagaagtcaaaaaaacggcctggtgtagctacgaccacttcaggatgctttttcttcagattgtcttcttgtctctttctattgccagcaccaaccaagctgacgccttttaatcctaaagcgtggatgtaaggattaattgcatgacgaatttgtacagctaattcagtcgttggcgcaataattaccacgctgttagcattacctggctgtgctttttccaaactaggaagtgcataagccaatgtcttacccgtacctgtcttagccaatccaaccaggctcgcaccattgcgaatggcatcatagctttctttttgaattaaagttggctggtccttgtgttctctaattaaaacttgtttgattttttcttgatacattattactgtgttaattgcccatacttttgcttatattgaccaacggtcccgttatacgcgtacatcgttacctggctttctaagcctgaaacattccttacgcgtccgttagtagtgtagcaccaaaatgaatactttaatttattcggtgccttactatctgatgacataaataacgtttgcggattaaagtaatgttgatatttatgatcaactttcaccatgactcttttgccagctgcttgcaataaagccgcaaactgccccattgaccgcaaatatctcgctgaacgagtagtcactgccggtacaattagaattggcagcgagcccgtattttgtcctacttgcttaaaaaagtagcggtaatgctgcatcggagtcgattcattgctataggaaatctcactaccaaatgccaagttcgttcctaaaatttggtcacgataagacagatagttttcatcaaaatatgatctgccttgggttgctttcaaatatataaaggaaacgccattagattgcaatttatgtaaatcaacatagtcaatatcttgatttaactcaatcccaatcgcacttgaattagcatctggcggtaaagttgtttgccgcttaaaattgaaaaagccaatcaaaagaaatgcaatcgccagaattaataaagtcaaaatcgctggcaaagtatacctatgctgaaatcttttcatcggctaaattcctcccttaattattttaaccgaaaagcctatcaatacaaacatttccagtcgatgtgctaaaatttaaataatgtaaacgaaaggcaacaaataaatatgaaacgacaaatctcattcggccaagcattggctaccgtagtcggttctgtcatcggagctggcgtatttttcaagatcggaacaattactgcacaaactggcagcacttcaatgaccctgtttgtatggattttagctgggatcatttcaattgcatcaggtttgaccatttcagaaattgccgccagcttaaaaattaatggtgccattaagtatcttgattacacttacggccgcgtgtggggttttctttttggctgggcacaaatgattgtttattttccagctcaaattggtgccctaagctcaatttttggcgttcagtttgtctccttatttggaattaaggcgaggtattctaacctaatagctatcttgctagtgctttttctcttaggaattaatctaatcggaactaaattttctagcaaaatgcagtcggtcatcactatcctaaaaatcattccaattgctttaattattatttggggattatttaatcctgccaaaatacctgcaccaattattccgttaacagtcggcactggacattcatttccaaccgccattagtcaagggttactttctgcgttattcgccttcgaaggctggattgtagtgactaatttggctaacgaagtcaaaaatccagaaaaagacctttcacgggcaattattttaggtctttcagcaattacattgatttatgttttaatcaattatactttcatgaccgttttacctattgatcaattaactaataacaataatgccgcgtttcaagcttcaatgaaattgtttggtcagtttggtggaaaactagtcactgtgggaattttaatttctgtttacggtgcggttaacgcattcatgctgacagggatgcgtacgccttatatcttggctcaagacaatttattgccattctccaataaaattggcaaggctaatatccataccggtgttccagtagttggcgcgtttattgttgatgctattgcaattgtcatgattctactaggtaattttactgttttaactgacatgctagtcttcgttatgtggactttcaacacaatgttgtcagttgccgtaataattttgagaaagcgtgagccagaattaaaacgtccatttaaggttccatggtatccgatcattccaattatttccgtgatcggtggtatcttcatcgttgtctcaacaattatcaatcaatttgttctttcaattattggtattggtttaacattgttaggactgccaacttactattacatgcaaaagaaaaataattaacgaaaaaagccgccgattttgggcgactttttatttgagtaaatatatttattaatgttgtgaagcaccgctagttgcatcattttcttgatgatcttcataggcagtattggcagcaattcgaccaaaagtgaaaatatctgccaaggagttaccacccaaacgattaccagcatgaatgccaccagcattctcaccagcagaatatagaccatcaataatttgaccatctttattcaaaacatgtgccttagtatcaattactaagccgcccatagtgtggtgaatagcaggctttctcggagtagcatagaatggtgcaacttcacatttgaggcctaatacattcttatggaagtctggatcctcgccacgatcaacgtaagaattataatcctggatagttttaaccaaaactgctggattcattccaatttgttttgccaaatcttcaagcgtatcagctctaaacaaggttccagccttaacttgcgcatcaagtgactcttgggttgtattgtaagcagtgtccttaatcttatcgtccgcaatttgataaatcaaaccaccattttcgataactgccttagccaaaacatcccgttccgcaaattcattaacaaacctcttaccctttttgttaaccataatatagttagcaggcggagttacaacaccagtgaaaagctcaccggtctttggatcagctactggcattaattggataaagcccataccgaataagtctgcaccagcttcaagacctaagttaatcccatcgccagtaattgcaggtgaattagttgttgtactatcgtctgcaatgtttggccaataggtattgtatttttgaaccatcttagtattggcaccaaagccacctgccgttaaaattactgccttagcatgcacagtcaaagtactactgtcagcgcgtgttgcaattacaccgcgtactttgccatcttcaataattagtttttcaacacgagtttcaagatatggatcgacaccatgctctcttatccaatcacccaaaacgtgaataaaggcataacctaatggctctactggcttatgacctctgcgccacaaaccaccaactggttctgtaacttgagaattatcaaacttaacacccaaatcttggagccatttaacagaatttaaagcattagttaccaattcatgtaccaaagcatatttaccatgaatttcgttaccttttaaatcagtccttttaccacctaaataagtttgaatttcatggagtaaagtcgaatcaaataaataatctgtaccagaatcaatatattctttgatttgtctttgtaatctttcaaaatcaaagcggtattctaaatcaatttgttcaattggcgtattagccaagtcttctaaagtctgtttttcaccaggaagagccttaaatttactttgccattctggttcagccgcattcattggaccaccagcacggctagtattaccaccgatctgtggatacttttcgagaacagccaccctttcaccatgttgaattgagcgaactgcagctgctagaccagcgccacctgcaccaactacagctacatcaacagtaatttcttcatcttctacctttgtagcagcgggcttttcacggtttttccattcggttgaatcgccgcctgcttcatcaattgcttcggctacgccatcaatcacaccatgactggaaatagtcgcgccactgaccgcatcaacgtttaaagtttgattttccacaattgttttaggcaaacgtctaaatacttcatcggctactcccttagtttcacctgatgaatctactttgattgaagtaactttatcgccatcaatgtcaacttccattggcattgattcggaaccatgacctttagcttttacttgatattttcctgacttcattgcttacacctctaataagtttaattttatccacaagttaatattagtgcgtcatctgttgatgtatcaaatatcaatttcactatactttcataataaaattgttatgagataactatgtttcgttctccaaataaaaaaagcttaatgcaaatagttatccacattaaactttttaattgcatgatttaattaataaactgaaacttgaaagctaagattaacgctccttccccgcgcctcttggctttttcttatcaaaaataaaaacgcaggatctctctgcgttatactttaagtgtcaacctgaaaagtaaaggagatcctacgcaatgaacagtatagaacaaatcgacacagaaaacgataccaaatccttaatttcttcatttattaatctaattggtctagctaagttgactaaacaagtcaactttaagcgtaaatctaccgtttcattaaccatgattatctcttggctgatgtctgtacattttgctcggctttccttattcagagctaatagtgacaagcgtttttccgttagaactgctcgcaatgtacttaacgatggaagaatcaactggcaaaaactattatgcttgattgcagctcggctcattggctgcttcaaacatccgtaaaaagaaacattatctttattcaagcatagttgaggctcaatatcatggacatatctttttattaaagctcgtttttgtctccaaccgtggaaacaagaacaagtatttagttttagctactactcagacaaagcttagacctaaagaaatcatccaactttatggtcgtagatggcaaattgaaacatattttaagacgtataagcaatatcttgctttagataaatctcaagttcaaagctatgatggacaatgtggctatatcgcagttacagcaataacttatgatctattggcctggcaggaaagacaaaatacagatgataagacaatcggagatttattctatctaatgaacgaatccttacctgatattagattcgtagatgcattggtctacttaatttcagaattaaaagagcttaaacagaatagttttgaaaagatagatgaagtaatcaatgactttattaaccaactgccacgattcatacaaattgcactgaaacagatcatataaaaactaattacgtctagaaaagctcaatagtgacaggacttgagcttgattttggtgctttcaagtttcagtatttaaattaagcttcagaggcgcctgatacagcatctgcttcttgttcatttgaaacagtaaaataattataattggtattatccgcagcagtcgtacctgcaacaaaaccagaagcatagctccaagaattcatcatacttggcattgaatcatgaccattagcaccaccaacaatttctcctgcagcatagaagttacttacgggattcatatcattgtcaagaagctgcatttgatcagtagtttcatatccacccaaagttgtgcagaacataagtttttgttcaattacataatatgtatcgccttcgaactcatgcataaacttcttgtctctaccaaactcaggatcataatctgctttaacatcttcagtatagttatccacagtttccttcagcgtttgataatcaatacctgctttttctgccacggtcttcaagtcgcctttgaccagaactggactcttctcgccaaccaaatcaaagaatgattgaacctcttccttggtaaagccatacttaagcattaattcatagaaacggtcccaggttctttgatccatgacaatgtaagctaccttacccttttgttcagcaatcgcatccctaaaatgcgtataaggtgcagattagttaactattctcttgccatcagtattaacaaaaatagcccccatatcggtcgcttctttagttgaataagttgttagcttagcaataccaggttcaacttccaatccatgtggatataccttataccagtctaagttacgcgtaaccaaattcatatttttggcaaaatcaaaataatcaccagttgaagtcattggaccataatatggaatatcagtcttatgagcctgataatcacgtgcaccccaaccaccagcagctaaaacaagtgacttgaaattgacattaattgtctggtgcttgccttcagcggttaaagataccagtttgccagccttatctttattcaacttttcaacacgggcatctaagataatttgtccgcctttttttcaaatgcctcagccaccttagtcactaattcatatgagctttcactaggcatttcaatttgacgatttacactatgttcaactgtttgggtttccgctttttgataagtcaaatttgcaaattcagtaataaagtctacggccctaccaatattgttagctaataactttgacaacattggataattggtaccgcggcattcacgagtaatatcttgaactagtctatttggcgaatccttctttgccgtctcaccaaataattctgcagaaactttagagtcagttcctacaacatttgagccatttaaaatagttgctccacctaaatagccatttttttcaagtacaactacttttttacccatcgaaagagcacgacttgccgccattaacccggccataccggagccaattacagccacatcaacatttagttgcctttcttcatgtacgacttctggcttttttccgtcaagagcaatgttattttcggctaatgcttttttaccagaatctagcattgcttgagtcatcaatgatgccccagaaacagcgtccacgtcaaaactttgattatcaataatatttttctttaatttaccaaaagcttgattaaaaattgcaggagtttccgaattcttggttactttgacatcgctaattttattgttttctaagtcaatctcaaaatcaatttgaccattgcgaccatctgcttgagctttaatagtttgtttgatcataaaaactactcctttacttgttctttttaataaaccgcctacattataaccacaatattaaatctaaaaaataaatttaatttgatattttaatagaatttttttatcaaaagcagtaaataaaagcgagtgatcattctcactcgcttgattctttatctaattttcatccttatttattagcgtaatgttgaataacttctggcttcaataccccaacataaggaaggttacgatacatatttaaaaagtccaaaccataacccactacgaattcattgccaacctttgaaccataatattctaattcaacatcggtagttcttctggcttccttatttagcattgcacaacacttaacgctcttagcgccacgtgccataatgtgttctttcatgaatttcaaagttaaacccgtatcaacgatatcttcgacaattaaaacatcgcgatccttcacgtcagttaccaaatctgatactatcttgaccttaccagttgactcaaagccatcaccataactagaaacatcgagaaaatccagttgatgtgctacgtccatttgtcgagttaagtcagtcaagaagtaaattgcacccttcaaagccccaacaactaccggctttttaccagcatagtcctcagttaattgcttacctaaacggacgcacatctcatgaatgtcatcttctgtgaataatttgtgatctataatttggtcaatattgtcgccttttgccatttaatctacccttcaattcaatttacatatattattcctaataaaaagaattataacatctttaaacaaaaaaagcgtcattttcaacgcttcctctgaataatttctaattttcatcctttgattgatcgtctttttgatctttatccttaatcggttcaacgataaaccagcgcataaagccttgttcgatactgtctaaggtaaacttatatccttcaagttcaattgattcaccctttttcaagttaggataatgttccatcatgtaaccaccaatggtaataatatcgctatcttgaaaggccttcagatctgtatggaagaaacgctcaaagtcatataaagtcgtcttacctgaaacatgaacttgaccatccttgtccttgataatgtaatcatctgaaacatcatcaatttcatccttaacagaaccgaaaagctcttcataaatatccttatcagtaacgatcccactagtaccaccatattcgtcaactactaagacaattggtgtgtgcttagaaatcatcaagtgcaagatatcttgaattggcattgattcaggtaccgtgataatagttctaataattcttgttactggtacgttgccatcaatttggctttgttgcacaatgtcgtacgcataaacataacccacaacgtcatctttatcattatcacgcacaactggaaaacgactgtagccttcttccaagtattttttcaaggcataggcaattgtatcagttgaatcaagtactgacaatcttgttctgtcagtcatgatgtccttagcaaccttatcgtttaattcgaaagctctttccatataagttaagtcttctttatcaagcgaaccaccatgaaccgcattacgcgacaacttgatgatttcagattgtgaataaacttcattttcttcatcagctggagtaaagcccatcaattttaagattccattggagctagtatttaatagccaaacgaatggataaacaatcgtatggaaaatatgaagtggcgtaacgatccccatcatcatcggtactggcttgtcaatcgcaatattcttaggcacaacttcagttaagacaacttccaaataagttaataaaactacgcctaagattgcactaactgacttgatgagtgaatcattcattggcgtcaaatggaaaagatcttccaatatggttgcgaatgtatcagccgagaaccaacccaagactacaccaaccaaagtggtaccaacctgagtagttgacaaatactcattcaagttgtgcgtcatatgcaaagcacgacgcaactttttcttatttccttgacccttagcaagcatatcttcgagctgacttggtctagtttgaactaacgcaaattccgcagcaacaaagaatgatgcaacgataaatattaataatgttgcaactaaattagttactatttgagctggactcaaagtattatcacctttttttacaaatatattactaaaacctattttaccatttcttgcctaaaatagtgcagttttacacaagggataacggttttttgtaatttattcgaccaccttgtaaatttcattaaacggtacacgctttggaataaatttaggatcattaatttcagcattcttgtcgatatagccaactgcaattgccattccgacagcttcatcatctggaatttgggcatattctctaaccaattctgggtatgaaaccattgagtgagctggcatcacacctaagccacggttaatggctaaaagcatgatactttgtgcaaaaattcctaagtcaaaaacggaccaagctggagatttcttcggaaccgttaaaaagataattgctggtgcattgaacattgttttattcgcatcattaaataattgaagcttatttctgaaaaagaaactttgggatgcacccatcgtagccatattacgacttggataagtatcccaatctagtgatagcattgaagcaaaatcttcatgtgcaacttctttatcatcaatctttttagctgaagcagccttaaacttgcttaaagcatcccccatcaaaacatatgcacgccatggctgagaattaagcaatgaaggtgattgctgtgccattttaacgattccagcaattgttttttcttgtaattttctattagtaaacttccgcgttacatgttccttttcataaacatccttaaaattcatttttcctcaattcctttttgcttatataataacaatctatattttattatagtaaaaaactgttaaaaagcttaattattgctcttttcttgctttttcttttctgctgcctgtttttttaaataagcactcattgcaagatcattttttcgcatagcaataaacgcagtaatggttaaagttaatccgccaagacaaatcacaagtaagccaatcggaaacaagaagtctgctcccttaggaataaatgatgccttaattacccagcatgctataccaattaacatcaaaactatacccacaatgactgccttagtgttcggtcgatatcttttcataaatgcccttctttcttaattaacattctaacagaaaaagcttagcttcaacgtagaagctaagccgaaaactagagaaatagtcgttaaatttttacatgagagaggggaaagttgactatttaagttcgatagtttgtactttttgggaatgttcaacactgcctttttcaatcggagtaactgacttaatcaggtccatgttggtgtagacaacgatgcagctgtcatcgtatcccttgtctgtaatcatttggaaatccattgtggctaagggttgacctttcttaactttatcgccttgactaacattcactgtaaacggagcaccttttagttcaacagtatcaagacccaagtgaatcaaaaactcaataccttggtcattcgtgataccaatagcatgtttagttgggaagagtgtggaaatactaccatcaactggtgcatagatatgattatccttaggcttgatagcatagccatcacctaacatcttagttgagaagacatcgtcttttacatcagtaattggcataatgtcgccgtcaactaccgcatctacttcaatacccttattctttttcttaaagaaattaaacataattaataacctctggatttctaaaattcaagtaataatatcaacataaagcttgcgagtaataaaccagctgcagtaagtgaaattgcgattattactcgactaacgccatcttgtgtcttcttcaaagctcttgctcgataaaaacctaagatagctaatactacgcaaagcaagttgccaacaaagagctgagcaatcatctgacttcccatcaagaagcgataagtctgtcgattgattaaaaactgcttgtggtttaacaacatatagtagcctagtatgaagtcaacgatagcaacgattgtactaatcgcaatcatcggctgcttcataatcatcatccgaatcgattgaccagaagcaccgcttcgtagtgcaatcatcgcccaaaacaatagtggagcaatgaaaagtacgtatgaataccaagtcaaaatcttcttagtatccaagtgcatgctttcggttattcgatcgataaagttgccaacttttcgtttactaattgcccacattgatctctacatcctctccttgactctgttgccaagctacatattcactaattaccaaatcaattaagaagtacgctggggtaaaggcaaccttcccgctcttaaagtcggcatcatcagtaaaggcaatcgttggaaaataaatgttgtgctgcactaatgaagctaatttattttgcttcaggttagtgaacgaaacatatttgaatttatcattcactagttccaacttagtgatttcctcattgatcgttttattatcacccgtaaacgagataataaacaaaacatcgcctttttgagcaaagcgtcccgcagcttttaactcctctaatgctgatggcaaaacagttgcatgcttgccaactacaaacaattcatgagccaaatattgtgcgattaactcttgttgccaaccagtagagtaaatgtaaattgtccctgcattatctaaatcgcgatacaagctattgaaatcacgttgtttgaaatacttcaacacgtctgaatttactttactaagttcccgcgcaaaattattttcaattttgattggtttttgcttcgattcggctaattcgaccaaatcaaatttaagctcactgtagccacttagtcctagctttttacataaccggaaaattgcggattcggatacataaagctttttagctaatttggctaagcttaatttgctacagtctctcggattatttagaacatattgaactatctgtttttcagaatcattcaacttatgactattgtcatagaccattgatctcaaatttgccataatacctgtgcccttatcaatatataatttatatattaatgataacacaagcgctttcagattatagcaattgtttcatttgatcaacaacttgatcggcatccaatccgacaacgatgtcaacctcgttgttatctttatgttgtacttcgtaagaatctgcgatcttcttgaattctgaatctggagcgaccttcttaggatcaacgacatgagttcttactctagttgagcaagcaatgacatcttgaatgttggagtcaccaccaagcaagtcaacgataccagtagctctttcaatataaggattatcttgttcagttgataccttagcgtcgccaccttgttgttgcattaaagtgttcatttcatcaagaacttgaggtacgtccaaacctacgataacttggatagccttaccgtggtgtacgacattgacagccttgtttgctttaaatgcggcatctgaagcaactttatttggatcggcaacagatacacgtaatctagtagcacatgaactcaattctgtaatgtttgaaggaccacctaataattcaaggtaagcagttgctctttcaatgtaagggtcattagcgtccttaccagcagcttctgcagccttcttagccttgtattctttctttgaaagaaggtgaacatcttgatcatcggcttcacgacctggagtaatgtaattgaacttctcgatcatgatcttgaagacaaagtaagtaataataccgaagataataccaacgataaattccatcacataggtcttccagtggtttggccaaagtggaatccagttcattgaagcgataccgatcgcaccatctgacatgaatcctcttaaaccaaaggcccacataactgtgttcatcgtggctgacaatactgagtaaactacccaaagaactggagcagcaaacaaataagtaaagtcgataggttcagtaataccagctaatactgaggttaaagcagctgggataagcaaagctgaagtttgcttcttcttgttcttcttagcagttgcgtagaaggcaagacagataaatggtactaagaataccttttcgttaccgtaaagttggaatccttcaactgaagcgatttgtgaaagtggtttagtacttgcagcgtattcagcaaggtgtttcaaccagtatggttgcaaaccgccggcaacaacggctggaccgaattggaatggaatgtataccaagtggtgaagaccagtaggaatcaatacacggttcaagaattggtaaatccaaacaccgataaatccactatctacgatgaagtgttgcatgctggtgatacccatttgaacttttggccagccccagcaggtaatgagtgctaaaggaatcattacgaagaatgctaaagcgtagacataagttgaaccttggaaagtaccaagccagtctggcaacttcttatcaaagtacttattgtgtaaccacactacaataagagcaacaaccaaggcacctaagatactagtgtcaagagtcttgataccagcaatgttagttaaaccatggttagtagcgttagcaacaatttggatcttgtcaaagttaggaataccaaaagctgcaccccagtgggtaagcattgcaccgatgaagtagttgtaagtcaagtaagcaataactgcttccatggctgctctacctctagccttgttggctaaaccgattggcaaacctacagtaaacaaaataccttcttggttgaacactgtccaaccaccagctgaaattgtgtcccaaactgagttccatgtagttcccgggttggcaattaaaccaaacagagtcgggttattgaacaaactacctaaagctacgacaatacccgcaaacgagaacagcataactgggacgaacatagcggccccaaaccgctgtattttctgcatcataatcgtttacctctgaagaaaaaaattaaatcaataacttattcttacatctacacctgcatctacatctttatttcatcagatcaagtcaaccgcaaggtgctcatacaattgacttttgccatttgtgcttcacacaaatatttactcctcaaaaatgttttaagataaaacgtccagttgatatcaaattctgaacttaactctatcttagtagctagcttacatttttatttataccatagttttaagctaatgtaagcgtttttaaaactatgacttattgtttcataaagttaagatgatatttcatttcatgaaatttatttcagcccttcaatgatgtatataccaatatttatacccctttattttgcttgtcgcgcctatgtttaatcatttactttacatacaaaaataacatgtcaataaatatgctatagacattctctatttatacacataaaatcctctgaaatatatttcatttcatgaaacgaaacaagtgataaaacctttttcctttccaagatgaactactttgcttactgaaataacacaaagtctggcataattaacggtaagttaaatgcacaggaggaattattatgacaatcaaatttattgcacttgataccgacggtaccttgcttaattcaacaggtaagattttgcccagtacaaaaaaggcagttaaaacagctttagaccaaggaataaaagttgctttatgttctggtcggccaatcgcaggattaaaacattttatggacgaattaggaattattggacctaatcaatatgctatcactcttaatggcgcaattacccgcacagcagatggcaagataatgactaaagatctagtttctaatcgactttatcgtaaaatgtatgcttttgctaacgagcatcatttaccttttaacgttgtttcccctgattcaaaaataattacaggagatcatgatgttgatttaatggtttatactcaagcttacgaaaatagtgcgactttatacattagagagctagatgaattgcctagtgattttgaaattgctaaaggttgttttgccactaaagctaagttgttagaccaatgggaggataaaattcgccaagaattttggcaagagctgtatattgttcgtgccgacgattgcttcttagagctacttcaccctaatgttaataaaggaaccggattaaaagaattaactgaaaaacttggcattactccagaagaggtcatggcaattggagacgaaagaaatgatattaccatgtttgactttgctggaacagctgtttgcatgggtaatggctccgaagaagcgaaaaagcatgctgattatgttaccacttcaaatgacgaagatggcatcagcaatgcttttgagaaatttttatgaacaacctaaaacaagtatctgagaagtgattaatctttcctagatacttgttttattatttgttcaaatattcacgcaaagctggcaaaactttctccgcctcaactcgtccgacctcatacactcgtcgcatctcttttttatctgtttctaaagtgccaatttcaagcggaaacggtggacgaataataaaagcttggtcagcagcttcatcttttaccatctgatcaagcaccgcattataatcctcagctttagtagccaatttttttactactgcggggtatttccttaaaattactttttccagtggatagagcttactctgctttttgcgataagacttcggctgtgtagcaatgactacctttttatcacagttttgctgctctaaaaaatcatacggaattgaatcagatacaccgccatcaaagtaataatgcccatgaattgcaactggatgagcaaaaaatggaatcgacgacgaggctctaatccactctaagtcaacataacctgcatcatgtaattgatgataaaccggctcacctgttgcagcatcagttgcaacacaccaaaagtccattggattagtcataaatttttctttatcaaaaacatccaacttatcaggcaaaatatggtaacaaaagttagccgcatacaaattgcctgaccgccgccatgatttccaactagcataatatggtttccccgcaaagcgcatgttgtagcgcaatactcttcccttttgctccgacttcaagtttacgccaaaggcagcaccggctgaaacgccaattgctaaatcaaaggttatgtcattttctaaaaacacatcaattacgccagctgtaaacagcccacgcattgctccaccttcaagtactaacccacttttcatattttccctctttatcaaaaaagacctacgcttttcgcataggtctaatttattcttattttaattttacttcaagcccgaccattgccattcggttacttctggcatgtctttaccattgtcgcggatgtattggtggtgcttttcaagcaagtaatccatgtgactgatgaagtccgcattcttgcccttcaaagctgggatgctttctacggcatccttagctaggtcaaagcgatcaagatgattcaatacccgcatgtcaaatggggtagtaatatcaccattttcttcatagcagtgaatatgaacattgtaacgcttgcgagcaaaccaaatggattccatcatgctcttgtagccatgccatgcaaagattactggtacatccttagggaataatctgtcaaattcttcagttgacaagccattcttgttgtcctttggatccattaacttcataacatcaactacgttaatgtagcgaatcttgagatctgggaacttcttatgcaaaatatcaattgcggccaaagtttcaatagttggctcagtttcagttgaagcaaagacaacatccggcttagcacccttatcagttgaagcccagtcaatgtagcttaagcccttgtcaaccaacttttgtgcttcttcaattgagaaccattgtggacgaggctgcttagaagttaccaaaacattgatgcattctctatctttcaaggccttatcgccaactgccaaaagcgtattagtgtctgatggcaagtattcatgaacaagatctggacggttcttttcatacaagtgagtcaagatgcctggatcttggtgagtgtaaccattgtggtcttgttggaatacagttgaagttgcgacaaagttaagtgatggataatcatgacgccagtattgttccttagcctttctgagccacttcatatgttgagtaagcatagagtcaactacccggccaaaggcttcataagtagcgaagaagccatgacggccagtcaaaacgtagccttcgagaaagccttcatcttggtgctctgacaattgtgaatcaattactcgaccgctaggagccaggttttcatcatttggttcatgaatctctggttcccattgccgcttttgatcgtcaagcaattggaacagacggtttgacttggattcatctgggccaaagccgcggaaagtagttgggttgagcttagcaacttcatccaagtacttagcccattcaaccatgtcttgtgcctccatagaacctggcttgtcaaacttcaaagcaaatttgcggtagtctggcaagttaagccgcttaggatcaagaccaccgttagtgattgggttcatggccattctatgttcacccttagcagtgttttcagttacgatttccttaggtgaaccgtcttcattaaacaattcttccggcttgtagctttccagccaatcagtaagcatatcagcgtgttccatatcgccttgagcaactggaattggaatttggtgagcacggaagctgttctcaattgggttgccatccaagtccttctttggaccagtccagcccttagggcattggaagataatcattggccagtgtggcaaagtagcgtcattgttttcacgggcgtgcttttgaatagccttgatttcttcaatgacttcatccatggtcttagccatttcttcgtgaacctgcattgggtccttttcaccgtcaaaacggccacccttaaagactgaaacaaagtgaggatcccagcccatgccacggaagtattcggttaattcttgatcgctcatgcgagaaacaatggttgggttagaaatcttaaagccgttgatttgcaagattggcagaactgcaccatctttaattgggttaatgaacttgtcactaaaccatgaagcagctaagggaccagtttcagcttcaccatcaccaatttcaacagcggcaataacatctggattatccaaaacagcaccagtaccgtgtgaaagtgagtagcctaattccccaccttcatgaattgaacctggagtttcaggagcagcgtgagaagcaacaccgcctgggaaactgaagcgtttgaatagcttagccatccccttttggtcctgggtaatctctgggtaacgttcagtatatgaaccatcaagatatgagttagaaaccattacctgaccaccgtgacctgaaccctcaatatagaacatgttcaagtcatacttcttaagcacacgattcaagtgagcataaataaagttctgtggtgcaatagtgccccagtgaccaattggcttaggcttaacgtcttctgcaaccaatggggtcttaagaagagggttcttcatcaagaacaactgaccaactgacaagtagttggctgcgcgccaataagcatcaacgctctttaaatagtcttttgagtcataatcaactgccatcttattctcctttgagcatctaagagtgctctttttcatttgttcttttgtttacacttatatcataccaagttatctaaaaagttcaactatttttataattggatcctaccaattaaaaaataagtatttaatttaaaattgcatcccttttttgttgctatatcaaccttttaatgctttgatataagtatttagttgcttaaatactgataagtacagataaacaaatatcaaatactgacataatcagtgcaaaattattcattcatgttagattactaaatggagggcatgagatgacccaagaagaaagattaatacaaattaaacagttacttaaaaaaaagcaccaattatcaactagacagattgcagctcacttcaatgtatcatttgatacggcaagacgagatgtaattcatctaactgaaactggtcaagcaattagagttcatggtggtttgatggaaattaattgcaacagcgtacctgattttttagcaagaaatcaagtacaatcaccggttaagatgaaaatggctagaatggcaaagagatttgttcatccaggtcaatgtgatttcatcggttcatcaactacgttaaagcagctctgtccaatgcttaatggtattgacatgcagatcgtcacgaattcaatcgacaacgcattaagcttattagcaatagaaatcccatcagtcagattgttgggcggcgttatcaacaaaaagcagcgtttcatttattctgaaacagcattagaaacattgcgtcaaatccatttcaatactgcatttattggtggatctcgaatcagagatgacggcgtatatacaccaagcatggctgattccaaaattgtcgaaaccgccgctagtcgcgctaatcaagttgtattagttgccgaaaaatataaatttactaatcaatcctcttcgccatacatgtctgttcccctcaatcagatcgatgtccttattaccgacaccccattgcctgaggaattaaagcatcattttaatccaaaaacgcaaattatacctgttttaaaggagtgatagttatgttcagtctctttaaccaaaagaaacaaagcgaaagtcgtgaagtataccaagatttgaagaatttttataatagtttttttagcaatatctacaatgaaatgaatattggtcgctatcggcagattcgcgatgcaattgggcttgttcttaataagttcgacagtggtgatcatcctcttgaatacactagcaaattggtcatgtatattcaggctcgaattgccatgaatcacctgcatctaactcatgaacagcaagacctaatgaaaaagctaagtgacgctaccaaatatgtaaatctttcttatgtttatctgagtccgctcacttcggtagaacaatttgttaatatttaagtgtatctagaacctgctctagatgaaaaaatgaatcccaaaagaccgagtagctgatctgctcggcctttttatgcaataatattgttaaaagatatagattttttcaaaggaaataattatgacaaaattaccattcaaagttgttgctgtcgatatggatggcactttcatgcatgatgatcaaactttcgatcacaagcgctttgaccgcatcttaacagaattacacaaaaaggggattcactttatcgtttcaagtgggcgcccttataccagattacgcaaagattttgctggctttttaaaccgaatcgacatgattgctgacaatggctcgcttttgcttcaagataatcaaattattagcactcatttgctcacttataaaacaaccttagatctaataagttttatcaaagagcattattccaagagttcaattattgtcactgggatcaacaattcatatacaactattaatgcttctcctagttttaagcagacgatgaacttctattaccccgatcgaattgaagttactgatttagcagcggctatcaatccgcaggatatgattactaaaatcaccttaagttatcaatatgatttttccgcggaattagaaaaagaattcaaccaaacccatgccgagaagattcactgtacttctagtggtttcggtttgcttgatattgtgccttacagcgttaataaagggagcgctctaaaatacttcttacgctattttggtgctaaacccaatgaattaattgcctttggcgacggaatgaatgatgctgagatgttaaaactagccgattacagttatgcgatggctaatgcagaagatcaagttaagaaaatcgccaagtatgaggccccgagtaacaatgatgatggggttttagaggtgcttgattcatatttagctaaagtagagaaataataattactgtaaactaaaaccgtctgaatgagcaaaataaaaaagtagccaagttttcttaaactaattgacttaagaaaacacagctactttttatttacccaaattaacaaaggtattaaagttcatataatgataatgcacgcgcatatttgatacttcaaacggcgtcccatcatccaagaagaagatcccttccattacaccaacaggttcagtcggcttcaaatttagcttctgctgatcttcttcattcgatggttcaacagtgatattcaagaatgacttagtaacggtctttccctgttcatcttccaaatagttaaacaaagacttttgtaaagtctctggctttaattccggcacaattttaatcggcaaatatccagtctcaattaaaaatggttgttcatctaacagtcgcagacgcttgaattcataaacaaaatcattttcatttaaaaataagtcttccgcaatttctttagttgccttaatcacatgaaaatcaagcaacttaatttgttgttttttaccagggactttaaaagaatcagtgattccaagattcgatccatcataacgaaacattgcctgtttgcgcaaatatagtggattaataaaagttccactacctcgctttttaaaaacgatcccttgttgagccaacagctccagcgcacgcttcattgatgatcgacttacctgatagtgttcggctagactgcgttcatcaggcagtcgcatccccttatactgattattcaaaatattctgtttaatgtcatgcataactgtccgataaacataatctgccattattctcgtccttgatctgcctttttaatactatcaataaaccaagttgcaaacttatccaagtccacatctgtcgcaatctccgcattggcatgttcttggtccataaaatccattacgctggcaccataagtatattgcccgcgcaattcaatattcacatttgcctttttcattgtaaacatttccggatgaagcataattccaactgcagtcggatcataaatcttaattcgcggatcaccgtctggttcatgaatgttagagaaaagtgaatacaacatattacccacttcaccacatgtcttaactttatccatttgctctggtgttaaatgggccttatttccaatttcaagtggagcaaccttaactagcaatccactatgaaaaactacctgcgctgcttccggatctcccgcaatattatattccgcaaatgggctatgatttccgtgaccaatattaccacccataattacaatttccgcaatattttctttaacttcaggatattgcttaaaaagtaaggcaaagtcagttaatggtccaatgcccatcagagttattttttctggactacttttaatttccttagccatcaacgttgcagcaagaccaggttcaattaaagaatcatcagcttgttcaaattcaaagccggcaatccctgttttaccatgaaccgaagcagcactaatcattggtgccaccagtggttgattagcacccactacgacaggaaccttagtatgcaaaaacttttctaaatttaaggtattttgcaaggtatatttcagtgccacgttaccccaagtaggcacaatcatgcgcacatcaagttcttgtgcaaaaagactaatcgtcatggcagcaatgtcatcaatgccaggatcagtactgataattaaaggtttcttgttcataaaattatcctctcgtattaagtacttttataatagcaaaaaaccaaccaattaagaaagtggttggttttattctaataattatttttcttttttgggtttaatacgttgaatgtgttcttcttcatggtcacctaatactaatggcacacgctcaaccacagtatcggcatactccagtccgaaccaagatgcagggttagaagataaattctgcagccatactcttgcttcaaccatgaacttttcatagcctgtcaatttagttaatggactaattacgtcgttaacaattacaaaggcgaagtcccctacatcacgacccggtgtagtagtgaattgttgtggttgagcttcaatcgttccatcagcgatcaaatcatgaacaatttgccgcaaataaacatttacactggtttgttttctaaaacctaaatacaactgaacgttaattacattcttagtaccataagtattgaccgcgtattctgcagtatatggctcgttagtaacattaacagttacaaaccagtaagccttagcccgtttaggtctcttatccaaaattgaataaagcatttcgcgcttaatgaatttattatacttaaccttagccatataaactacattcgtagcgtaaactggataatcatcacagtggctcaactcagtcaacatatctgtatattcatctaagcgaacataagcattctgctcctcacgcttatcacggatcttattgccatagaaccacacgtacatgattgccaaaataaaaccagcaattaaaacagtgacgtaaccgccatgcaaaaacttagttaagcttgagaataagaacatcccttcaataaaggcaaagactactaagaaaatgcatcgtattgatagcgcggtaccttttttacccagatattcaaataataaaatagttgtcatcaacatggtaaccgtgatggccagaccatatgctgcttccatatgatgtgaagttctaaataagaaaacaattgcaactgtaatgacacagatcatcttattaattgaaggaatataaatctgtcccttctcatttgaaggatagataatattcattcttggtaaaaattttaaactacttgcttcagctactaaagtgaatgaacccgtaatcaaagcctgagaagcaataatagcggcaatcgtagccaaagcaatagcaaacaatcttagactacttggtactgcttcaaaaaatggattgaaatcaccattaccagcatgataattagcattttgtaaaatccagacgccttgccctaaatagtttaaaatcaagcaaacaaacacataaggccaagagcccataatattacttttcccgacatgtccgacatctgaataaagagcctcagcaccagtagttgccaagaaaattgaacctaaaatcaaaatacccactttattagcaggactaaataaaatacgcaaagcatgaattggattaattgcatcaagcaaactccaatcatggcttaagttcataagtccaatgagccctaaaaaagtaaaccacaggagcatgattggaccaaaggccttaccaatcacactcgttcccattctttgaattgaaaatagtaaaaccaggataacaatagtaatcaagataaccatatcttgcgacgaaactggaattacatcaccaaagcgcatatttttcaatccttcaattgaagttgtaacagtcacagctggagttaatgtcccatcagctaacaatgctgctccaccaattaaagctgggataactagccatttagccctctttctaaccaatgcataaagagagaagatccctccttcaccatgattagtcgccttcaaggcaattatcacatatttgaccgttgtcaataatgtaacagtccaaaaaatcaacgaaatggagccaacaattagttcacggttaacattactaatcccaccattttcagtcacaatcgacttcataacatacaaaggactagtaccaatatcaccatagacaataccgatagcaattaaaaggccagtaaaagacaccttttgcttaccagatattttattcataagtttttatcctctatttcacttaaaaattgaaatttttactagtatagaaaaagtctcgattttttgcaataaaaatatatctttttgaaaaataaaaaagaagatgaaatctccttcagtcacttaatttactttttcttatcttcgatggtgccatcactatgagcaataattacttcgtcacacatatccaggaacaagccatgttcaactacgccaacagtatgatcaaggtaatcagctaaaccatgaggtgctggaacaggatctgcagccaaatcaataatataatttccatagtgagtcacataacgttgattgccatccatacgccaccgaggctttaatccttcttgttcaaaacgtttaaagttttgttcacaagaaattggtaaaacttcaactggtaatgggaagccgcttaaacgatgcactaattttgattcatcaacgatccaaatgatcttcttagaattgattgctacatttttttctaaagttaatgcaccaccgccgcctttgattccatccaagttatcggcaacccgatcagcaccatctacagttaaatcagcttgatcaatatcggccaattcactaactttaaagcctaagccctcaagttgttttttactacggttactagtagttacgatagccttcagttttaagccgtcttcatctttgcgcttacctaaagcatcaatgaaaaaggcaacggttgaacctgtaccaacgcccaataccatacctgatttaaccatggcggctgctttttctgctgcttcttttttcaaacgatcttgttcttgcttgttcattattcatcatcctccatcgcctgtttaacttcctgttcagttggaattgaaggctgagcacctaaacgttgtacggcaattgaagatgcacgacttgcaattttagctgcttcttcaaagttagataggtcagaattcaaattgcttaccaaatatccaataaaggtatctcctgcaccagtagtatcggctgcttcaactttataagttggtattaattcttcaacatcgggagttgaaatatacgcacccttatcaccataggtaataaccacgttttttacaccaagcatgtgtagtttttctgcattagtggccagcgttgaattatctttaattgcaattccagtgatcttggcactttcagtttcattcggtgtaatgatatcagtatattgcagtaattctttaggaatctcataaactgcaggagctggatttaaaatagtgatttttttggcctttttagcaatcttaaatgcttcaagcgtcacatctagtgggatttcgaattgcgcaattacacaatcccaactcttaatcaaatcaccagctgcacggatatcttccactgtcagttcataatttgcgccgtgatcaataatgatgtcattttgcccagcttcattcaacgtgatataagcatggcctgtctttgctcccattgtggtttgcacataagttgtgtccacgccataactcttgagctgatgcgtgataaaatttccttcactatcttcacccacacggttaataaagtaagtttcagctccacttttagcagctgcaattgcctgattagcacccttaccgccaccagcagtagtaatgtctagcgcattaattgtttcaccaggcttaggaaagtcttttacatgtaatgttgtatcaacattacttgaaccaataactacaatcttcttcattatgagcatcctcttctaaaaatggatttattcaacctcaattataacaaaaaacgtattcaaaatattgaacacacatttttgaaatcttactgtaaaataccaccattaacgaagccttttaagcgctcagcttcccacttcaatgtatctgaatcgtcaacttgcgagatcttatacccaacgaaatatggtgaagcatagaatcgtggaataatcttgcaacaagtaccttgaccatcattaattggatagaaaaataagttataagaatcaacaccatgtgacaagactgaacgcacatattgtgtgcccttttgaatcaaatcggcccaagtatccaaattagtattatcatgtgtcaaaatatttacttcttggtagccttgaactggacgcgctgataagttcatttcaactgaacccgaacgcccgacttcaaatcctttaaagttatcagcgccaatatcgtgatagccatctttatgatataagcccacgatctgcatatgtggatgagttaaagaaccatcagacttgggaccaaaatttttataccaaagcacactctgataacggcctgaattattcattttttgaaaacacttcaagccaaacttcatcaactcttgattatcttcacgcgtataagttgaaatatctccctggtgatcacttgattcaattaaaattgtttgattagtatcctttaacgtagggtacttattcttcaaccaaatcttatcgccatctttttcataaatattaactagatgctgcacatcacaaaaaggacagccagcattctgatttccttgccgattaccataatcataatcatatggcttacgcttaccaattgaatattcatacactaaaggatttttgtccatatttttcacctgctaaaccaaagatatcatacatttaacatcattttaacaattttatcggttaattgtgaacgtttttattaataaagctaggaatagtacgtctatctatgataaactacctttgtaaaagaaatacatgatatacatgagaggaagaatcatgaaattctataaaaaattggtacttactggtgccgcagctttagctgttctaggcttgagtgcatgttcaaataataattctagttcatcttcatctaataagaagattccaactaagattaacaagaagactaccgttaccttttggtattcactaactggtaatgcgcaaagcagtttgcaaaaattgactaaagattttgaaaagaaaaatcctaacattactatcaagttgcaaagccaaggtggcaactactctgatttacaatctaagttggtttcaggtttgcaatcgccaaaggatttaccgacaattactcaagcttatcctggctggctttacaatgctgccaagaacaatatgcttgttaacctaaccccatacattaacaattctgaaattggctggggctcatatgctaagagtggcattaagaaagctctttgggatggtgcaaacatcaacggtacacaatatggtgttcctttcaacaagtcagttgaagtacttttctacaataagaccttacttgataagtatgatgttaaagtcccaactaacatgagtgaattggcttctgcatccgcaaaaatttaccgtgaaagtcaccacaaagtacgcggtgttggatttgatgctttaaacaattactacatgatgcaaatgaaggaaacttacggcaaagacttcaataagaacttaaactttgctgccaaggattccgttaaagccatcaactactacgctaatggagtaagagccggctacttcatgcaagctggtactgaaaaatacatgtctaccccattcaacaatggccgcgtagctatgttcatcggttcaactgctaatgaagcttaccttaagcaaggacttaagaagggctacacttacggcgtagctgctcgtccaagtacaatgaatgtccaacaaggtactgatatctacatgttcaaaaaagcaaccgcaatgcaaaagtcagctgcgtttaagtaccttaagttcttaacttctaagtcatcacaactttactgggctaaacaaacaggctacatgccagttaatactgctgctatcaacgacaaggtttaccaatctgccaagaacagcaagataccagcaattattgccaagacctctaagaacctttacttcttaccagtaactaagaatgctactgccgcatatgatcaagttaatgctaacatgcaaaccattttagctaaggcaagtaaaaagcaatcatggaatagcgatatcaagactggtaaagataagcttgatgctgcttggaagcaataatttttcaaataaaatatctatcaaaaaaagaagttcagtattaattcaatgtcattaagttaagctattgacattggagaaaaaaacaattaaagcatcatttggctttagatagccaatttgatgcttttttgtgtacgccaaataagcgtagtttgtatttcttttttattaggccacgcgatacatgtaatatactgcagacttggcttttaaatttcgtttgtcttttcgcctttatttttgcaaaaaaaagaatcgaatccaaatgattcaattcctaaaaagatcagttttcaaaagtcaatagcttaacttaatgacattgagtattaattgaacttcttttttttacctaattatttactaaaaatggatattgaatttgatcattatcagttacattcaacttgtaacgagcacgatataaagccttttctaccgctaattgccctgcagttgtggccattgcaatcgaatatgacttgtgtggtgaattgatcaggatttgactgatagaatgcttaatgtatgactggattagaatgacataattcgattccttacatgcacgtaaaacattagaagcctgtttcatctcgataattcgagctactccattgtgtgcttcaatcaccttagccaagttagaggttaagctcttgtctcctactacaacggtaactcgttttttatcgaggtcaaaatcaattcgggaagcatagtcttcattttgcttttcagacgactgcttctcctttttttctaattgatgcaataaagacttgtgtctacctttagtcttgtgcttttccgtttctttatttttatccggcttttccttcttttctggaatagtaacttcagcttcggcataacgccatctaaccctaatgaaggatggatcactgactcgccaaacaatactaatcaggtcattttcgtgtaagttaaagtgacttacagtattcatgtctaagtataaaatagctttttcaggatttacttgacttaggtttttgccattagagtcctgcttgatgtataaaccaaaagaatcacggtgaactaccgctggaccaaattcgataatttcctcatctggcgcaaaagactttgcatgatgctcaactttaataattggacgattgccactgtcatttaagtgatctagcaaagtaactgtatcaccgttttccagcttttcaattctagtcaagtgttcattaaaatattgtactgaatgaccattctcatccactgcttctgcacctagcagcttacgtctaatctcatattgtttttcctttggtttagccacaggaattattttcttaaccacaggcttaggaataggagttatggtcgcatatttgtttttattctttaaaaccgtaggactcagagctttagcagcttcttcttttttagctttttctttttcaagctcttccttcgtttttttcggctttattttttctacagtattttcatcattttcttttttagtttctatttcagttttattttctagcttattctcagtttttatttctggctcattttttacagtctgatcagctttttccgcaattttaacgacttcattcttattctcaggtgaattgcctagtactgcctggttatatattttactaataattttcaacgcaatcattgactgcttcagtgattggggatcgctccccgtcgcctgcattaaatcaataatatcttttctataatcaatcgtcatatatttaccttctcgtattatataaattgtaattagtcatattgtgataattaatcaaattagtatttgctttttgatcttcacatgttagcctctaattgtcattggctttggtcaactggtctaggttatcacctcctgcagttttgtctgctttataagtctgccacccagacagttcctttatgctctaactcacatgctgtattgattgcttctttttgctagtccttgagcaattgggattaggtgcagctttcaaagaagcaaccagtgaatacttatactggcgagattgaacttaagaactgtaattaggggttaacatgtgaagatcaaaatctatgatcagaaatttgaaagaaaggaggccatttccaatgaaattatttgtcggtattgatgttagttctaaagatttacaggtcgttgcacttgattcagaagatcaaaacaaacgcttaattaacgatagctttgtcaatgatctttatggtgctagtgaactgaaaaaacaaattttagatctagctcaaaataaacactatgatcaaatcattattggcatggaagctacatctatttacagttttcatcctgcttactttttccaaaatgacgaagatttacaaaagctcaatgtagagactgatgtaattaaccccaaagaaaccagcaggtttcataaagtctttgaagaaagtaaaactgatcctctcgatgcttattacattgctttgtatctaagctttggacattatcgagtaagcattgccagacaagacaactatcttgctttagagcgtttaacgcgtaccagatatgaattagttcaagaactgactcgtaccaaacagcacttcattgaagctttatattatcgggttaataaactaatcactgtcgataaagataagattaatactcctcttttcggtgctacaatgatgtctattgtaaccgatagtaaaactctggatgagatcgcggatatgcctaccgaagacttaatttcttacttacaggttaaaggcagaggacgcttttccgatccagataccttggctaaagcaattaagaaagctgttagaggttcatatcgcttaggcaaagtaatgactgattcaattgatgcagtgctttctgttcattacaacatgattcaaagctttaatgaatctattaaagatctagaaaaagcaattgatcgtatcgttgatgcattaccagaaagcaaaattctggaatcaattcccggtattggcaaaacctatacagctggtattatcgctgagatcggaagtatcgatcgctttgataaagaagaacagctggctaagtatgccggcctaacctggaatcaatatcaatcgggagatcacagcaacgaacatactccaatggccaggactggaaacagatatctaagatattacttgattgaagctgccaatctagcaagattacatgatcctgttttcaaaaaatattaccaaaagaagtatgatgaagctgtctactcgccgcataaacgtgcttgcacattaactgcaagaaaattagtacgagttatctttaaattgctcaaagatgacaaactgtacaggacaccgaggtcttaatttcaaaaattggtctaaatttaaaagtaaacaaaagtttaacattaaaaaaatcaacctttaccaaggcttagtttcatatactcaaatttatgatcaaaaagaacaaatatcatcgcctttcatttgacttattaccacatgacttatttcttaaatatgaatattatacaaaagtttttaatgctaatctaattcttgagactgtaaaatagtttgtgtaaggatgaatgattccttaaatttatttctttaaacattagaaaaaggagttcctttctcgtatgattggtttgaacaaaaaaacacatacagaaagaagaactccttcatgaatgattttaccaaagattttgctcaagctctattcaatccagacaaaataaatgatttattgcgcaaagagctacaacaggctgttaataacttgttagaagctgaattgactgcctttctgggctatgatccctatgccagaaatggctggaatactggcaactctagaaatggtgcttatttccgcaaagttgatacgcaatttggcccaattgaagtgcaagtgcctcgggatcgcaacggtcaatttcatcagcacacgctgcctggctacaagcagcactcggatatcttggaaagcatgattatcaagctttactccaagggcgtgaccaccagggaaatagccgatctaattgaaaagatgtatggcagccattacagtccagcccaagtatcaaatatttccaagcagatgattccaaaggttgaggcttaccacaaacgcaagctaagcgacaagtttttctgcgtctatttggatgcgacataccttcctttgcgccgagaaacatttgagcgtgaagcagtctatattgccattggcatcaagcctaatgggcacaaggaggtcattgactactgcattgcacctagcgagaacattgaagtctggacagatatgcttcaaaacatgaaatcccgaggcttaaagcaagttgagctttttctttctgatggtgttgttggcatgaaaacagccttggccaggacttatcctaaagctcattttcaacgctgtttggttcatgtcatgcgcaatatctgcgctaaagtacgcgtcgacgatcgtgaaaagatcatgaacgaattcaaacaggtgcatcaacagacaaacaaagaagaagccacagctgtcctgcatgacttctataccaaatggggcaaggtttacagccatgttatcagaagcttgaaagacatagaaccagatctgctggtcttttataactatcccaagcagatcagagcttcaatttattcgactaacatgattgaatcatttaacaatgtgatcaagcgcaaagctaagcctaaggcagagtttccaactgaacagtcgcttgatgcttttattggcattcaggcaatgagctacaatgaccgttatttcaatcgaattcataaaggctttggtcaggttcaggacaccttagaatcctactttgattaaataaataattaaaaaatcaatttacgagaaagatctatttacacaaaagatttgacagtttctaattctttatagatttttatattatttttcctgtaaaaccattataataaaagtagttaaaatatcatttattaaatggggggagactactatgaaaaagaaacttttacttttcgtatcctttttagccggtttattgttcttggtatctacaccaacttatgctagcaagcttcctaaaggctatggtattgctaaaacctttaccacaccaaaagcaacccgtggcacctggtattatcgcgaaaagggtgataaaacaatttctaaggtaaagatcactgctcatagcgtagatggtaaaaagctttacgtaccttcacaaaagttcttcgagaaaaatgtttacaacgtttcagctaagaagcgtaatcagttcatcaaaaaaactgaaaatatttatgctgcagctaactataaaaagggcttcaatgtcaacaattgggttaacttagctggtgatggtgagtactacatccctgttactagaactgttaacggcaaaaaggttaaggcattaagaatagctactggtgctggtccttatactgctgcatatgcatacaaaactaagacattggttaaataatcattgtctaacgaaaaagcaaattagcataatttgctttttttctacccaaagtcaagtattatcaatgatttaagaaaataaatttacttgttttaatgatgcgaataaggttaaagcaaataagagtttaaatttaagaaaaagcgaaagtaccacaaataagcctactaagtgtataattttttacggtaagttgaataaataattaaaaaagcccaagtcctttgaatttggacttgagctcaaacaaaaagaccagtagtctgatgttaagaacaaaaaacacattagaagctggtcttttatgaattcaattgtaactgaaatcgcaaatattataaagtctgaagataattatattaagcgtgaaagaaaaataatctgtttcttcttaaacctgattaaggaaatcatggccttggctttagctaaagttgatgatgaaatgattaccaaggttaaagcacagggctatcagattgataagaagaatgagcgctcaatcaatatggcttttggcgaagttaggtatgtcagaagaagatatgtctgcccaggcaaacaagcaaggtatcccttggatgaattaatgggctttgacaaatacaagcgctacagtattttagcagtcaaaaacatcttagaagtaagcagcgttgccacttatcgcaatactgctctagcagtcaattgcctgtctggctttaatattagccatatgcaggtgggcaatttggtaaaaatggccgggaaaaatattaaagcgggccaagaagcagattcaagatatgatgccgcaggcactaagaaaaaggtcccagttttgtatcttgaaggcgatggcgtggtgatcaaaggcactaaaagccggttggaatttcatcgctatcaggtctgtgaaggcattgtcaatataagcaagaaacgcagaaagcgaatcaatgccaaggaatttgtttctttaagccgacttgatgcgctgaacgaagccaaggagtacctggccaatacttatgatctttctgatactgtaattcttagcaacgccgatggcggtgctggatatgccaaaacagacttcgatgacattgtagggctatgcaagcgtcatgagcatttcttggatgtctttcacctaaataagaaaatcaaagaaaggctatattttgcgcctgacctgcaaggcaagctgatttctgctttggaatacaaatacagctatgacaaagttaaaactatcctaaccactgcagaaagccgactaattgatgaattgaataccgagctcaatcatgattatctggggcgcctaaggaattatattgatcgtcattgggacgatattaagccgtttaagaaacgaaaactgactgtgactaaagccattggctgctgcgagagcaaccaccgcaagtatacctaccgtgttaaggggcaaggcaagaaatggtcaaaatctggagcagaaggcatgcttaggatcttaagctgcatcaagaatcgagagctggaattttggcttagcagcgagtttgaagattcagaaataactgtattgactgaacaggaattaaaagcagcggcccgtgacagcttaaagaagcgtcatgaagttcatttaggcatccagcatggcgcattaaccgcacaggtagctggcaatagttatttaagcaagctaagcagaaatttaagtcatataaatatttaagaaattaaggttagactaatggtttaaaggctaccgcaaaaacattgacacttacataagcctatgaatacttgtagtttttccataggttgcttatacttaagttgattatttgatttcagctaaagtcttttattttcggtggctatgttgtaatcatataattgatcatgtttgataagagcaaacattgtgcgtatcagtttatggactgatgcaatggcgattttcttatagccttgtctatttgaagatcgttttttcttgtcataataatcagttatatggcaaggctgcgtagcctttaccgtctccatttgagtaataactcgataaagtatttttctggcaatatgattgccatgcttggtaatgccaagagaactgtctttttcaccagattggtaccttcctggatcaatgccaacaaacgcatcaatttgagctgaagtgctaaaccgtcttagatcaccgagctctgctactaatctcactgctgtaattctagcaacccctgggatactcaaatagatggataaagcacgagcgtttactgctttagccagcttttccatgtagttaattacatagtcgcgttcttgctggagtgaaaataaattagaaatgttcctttgaatagctctaacgataatactatctttggaatcataaggataagcttctctagcaaaagcgtataatcttgtggttaagtaccgtgccctttgttgtcctattccagaaatagaattaagcatttgagttacctgtgtctcattcttttctagaacatatccagcatgtgggaaaagactaacaagcgcccaataaattctgccagatggatgagacagtatttcttcaatttgtgggaaagtggattggaggttgcggtgcaattgatttttagtagtaactatactcctagtaagttcttcataatagcgactggcattctgaagttcatgatactctctgggctgtggatcacgcagcttttgcggggcattaaattgaattaaagccaggcgataagcatctaccttatcagttttattatggcgtaaattattgtccattagctttttcgctttaagcggattaagcttcaaatacttaatatgataatcctctaagaaagcttgcaggcttagagaataaacaccagtagcttcgaaaacaactaaaggagttatcaaatattggttcagttgctcataaagtttttgatagccaaaggaatcattagagattctaaaagattcgccttgtttgatccggtcattaaccacacaaactgtggaagatttactgctaacatcaataccgaaaataatttgtgattccataatataacctccgctgtgaagataaacctctttatcaacctattaattctaattttctaaacacggcatctaagtgcccacagacttcgaagagacttaagaataggtggtaaagcagtccgtttcttttacgacatcaagtgtctaaaaagctgaagacttgatttgctttatcttcactttctattttagacaaaataaaaagtgccagatcgtgaatccgtcgattcatgatccaacactaggttagtatgtttcttttaccgatttttacttttccgtatttctccttcaaaaagagcggtcaattttgccaaactcttatgatcaggatagcgttgaactaattgctcaattttatcggtagctaatttttttacttcttcggctgagcccattttctctaaaaaatctgccaaatcacctgaacgagcaagtaacttacgctcactacgactttctgccagaaaagcttgatcaaccttacgtaacttcaaactaccatctgcattaaagtgatatcctccccacatatgctgcttaattggttgcatcggttcgctatccacataacacaatttccctaccatatggtgcgtctcagtaattcctaacgtaaccgggtcataaatatcgacatagttaaaaattttctcccgcattttagccacctgacgtcgttcagctggcgtcagtaaaagccaaatattggttccttcatacagataagcagctgcaattgcttctggatgacgacaattagctaaagcaaactgagcattaattgaacctaacgaatgaccataaatataaattctactacctttaaattgattaattgtctgattcaataagtgagcagctgattttaattggctaggaatcgtccgttttcgtgcaagcagtgcttttaaaattggtagattagttttaatccattcatcacgccaagtttgtggagtcccctttttaaaaccatatgatcctttaaataagattgttatttcattcggacttgaaatgacgaaggctcgcatcccatccttagcataaacattacgacaaacagttccaagataatgttgatctattttgatagtatcacccagctgcaattcatcatatgcctttttagttaattcaactcgttcacgatctgttaactgtgcatttacactcataattttccctaaaataaaaaactaactcttactattatgttagcatgagttagtttttttggataatttgagcctttaatcatattttttctgcaagtaatttgcaatcgttgacaagcagaaacagacaataaagtacatgattgcaataatcacatacattggaattaagtaagtcgtgttctgactgtaaataatttgtgcgtggtataaaagctctggcaaaacaatgatagttgccaatgaagtatccttaaccaatgatacaaattgtgataataatgccgaaatcatattgtgcaaagcttgtggcataattacatgatacatagcctgaccatacgacatcccgttggaacgggcaccttccatttgacccgaatcaactgagccaattcctgaacgaacaatttctgctagcattgcaccttcaaagatgactaacgctgcaattgaagctgtcgttggattcgttacaatacctaattgaggtaaaccaaaataggtaaagaagatgatcaacaatagcggcaaatttcgaataatatcaataataaagcctacaattgcagacacatacttaattttcatgtagcgaactaatcctaagattaatcctactacgaagcttaatgcaattgaaattaatgaaacataaatcgttacccaaagtccttgtaataagaagcggatatcgacccatgaatatgcatgaataaaagtttccattctctatccctttcctattagttgactaattttttctctaaatgacgcatgtagtaactaagcggcaaagtcaagatcaagtagaacaatccaacaataatataagtatcaattgtttggaacgttgagaacgcaatcaattgtgcttgatacatcaagtcaaaaccggcaacaaaggccaaaactgaagagtttttaaccaagttgacaaactggttgcctagtggtggaatcactatcttcatcgcttgaggtaagatgacataacgcatggcttgcacataggtcataccgttggagcgagcaccttccatttgaccagttccaattgaattaattcccgcacgaacggtctctgcaataaacgctgatgtataaagcgttaaaccaattgtccccgcttgaaatcctgacaatttcacaatataacgtggaacgatcaaataaaagatcatgacaattaccagcaaaggtatatttctaaaaatcgcaatatagatcttcgcgatcacttggccaaatttagatggtgctacctcaagcaaggcaaaaatcacgcctaaaatcaaactgaaaactagagcaataatactacttaaaatagtattccaaaaacctgttaggaagctgccccagttgttagtaataatttgccacattatttcaaaaccccctttagactaaaaccaggaattccagcaaaccactttttaatcaaacggtcataagtaccattcttttgtaattcattcaaagcttggtcgatatgatcagccatttgtttttgtcccttattaacagcaattccgtaaggagcattactatagacgccgccgactaacttataaccaggattttcttgagcgataccggcaagcaaaccgttgtcagtagttaatgccacaccttggttagcctttaatgcagacattgcttgaccatagtcatcatattgcaaaatccgcgctttaggggcatacttatgtacatcatcaactgcggtagttcctttaacggccaaaacagttttgccttccagatccttaacattcttgatcttactattattaggcactaacaaagatgaaccggctggaaagtatggcttagagaaggttacttgcttggcacgttctggtgtaatagtcattgtggctaaaacagcatcaacatttccattttttaaaagtgggattctagtgttggcagtagtagtaacaaaatcggttttagcatctttacctagcatttgcttagttaaagccttagccaaatcgatttcaaacccttcaatatgtcctgtcttaatgttcgttaagccaaacaatctagtatctgctctaacgccccaaacaattgtcttactttcttttaccttttgataaacattattgctagcatgcttgccacaagctgttaaggtaaacgctaatagaatcagcaaaggcaagaaaagaaatttttttatctttttcatggcgtgtcaccttaatctttagaaataactttgcttaaaaattgccgagcacgttcagtatctggatgagcaaagaattcttctggcttgcgatcttctaaaatatgaccattatcaaagaaaattaagcgattgcttacttctctagcaaaacccatctcgtgggtaaccacaaccatagtaatgccttgttcagcaacatatctcataacttctaaaacatcttcaatcatttctgggtcaagggcactagttggttcatcaaataaaatcaccttagggtgcattgctaatgatctagcaatcgctactctttgtttttgtccaccagataattgacgaggataagagtcaattttatcggccatacctactttttcaagatattgcatcgctactttacggttctcatcatcaggacgctttagcacaatcttaggcgccagcataacgttctctaacacagtgtgattattgtagagattaaagtgttggaataccatcccaacatttttacgaatcttattaatatcggtctttttatcagccaaatcatacccagttacaattaattgaccgctattaattggttccaagccattcatagttctaattaaagtactcttacctgaaccagatggaccaataattgaaaccacttggccttcatcaatctttaagttaatatctttcaatgcatggagctttccgtagtacttatcaacatgcttaaattcaataattgctgtcatggcttctacctttctttcctttgtctacacaatataattattttactcttcttaaagctaaaactaaatattttagcaattcaaaatagtataatagcctgctaatcttataaatttattcggttttagcaaaatatatttgtatttagctagattaaaataatcatattaacgctacttacgaatttattaactactaacttttaggataaagaaaaagtccctcatccctaaactgggacgaaagacttctttccgcggtaccacccacattgcctattagatatagacctactcatgaagcactatcatgcttcaccggtgtggtaacgtaccggagacgtctcaacctactctaagaattgttatttcggtgagctgctaaaagtgtttttcaatagttcagggtctattggcttttcactagcaccaactcactgttagaaataaactatctacttgtctttttcatagccttttaatttatttatatgtatttaaccttattttgggataaaaagcaagcaaaatttcttatacttcaaaatgaatccgtttttaatacaaataaatgctgttaatattcggaaaatagcttaaaatatttagtgatatattgaaaaacaaaggagtttgaaatgggaaaacttgaaaaacccattatcattggaattgccggtggttctggaagcggcaaaactaccatcgctcatgaaattgcggataatattaatgatcaagatcgcattatgatcatgacccaggattcttattataaagataatactggtgtatcaatggaagaaagaatgaaaattaattatgatcatcctgatgcttttgatatgccgctacttgaggcacaattaagtcagttaatgcacagaaaaccgattgaaatgccaacttatgattttaccgctcatactagaagcgatgaaactattcatgttgagccggccgatattattatcttagaaggaattttagtcctcttcaatgaagatattcgcaatttgatggatattaaagtttatgttgataccgatgatgatatccgttttattcgccgacttgagcgcgatatgaaggaacgtggtcgttcacttgactctgttattaatcaatatttgggtacagttaagccaatgtacaaccaatttattgaaccaaccaagcgctatgccgatatcatcgtacctgaaggtggggaaaatgatgttgcaattgacatgttaactactaagttacaatctgttttgaaataagcagcaaaagacctgataatcacaaagcgaagattatcaggtcttttctttattctaaattatcttaattttgattatcatcttgtgcattagctgtgtccaaaattcggttatacttcttggcaaagaagaccaaaagcaagacactagcaataacataaattaccgctgcaatgtaataggcatttgcataaccatcttgggtagtaaataagtaaaattcggtgaagagtccatcaatgacaccgacaacagcataagcaatctgaaccacaccggtaaaggctggacgcaagtccttatcaacaataaccatctgaacttcttgttgaattggcattgtggcattggctaatcctgttcttaagaagagcaaaagaccgacaattacaaacaaaactgtctcgctacctaagcgacgaccgttagctagcaacaacataactggcacacaggtcaatgtacctgcagcaacagaaacaatcgcccccatcttcttttccaagaatggcgcaaagaaatatccaattagcatcgctgcttgaacaaaggtgttaatggtagaagtaacatcacgtggaatgtgcaaataactattcaaataaatcggcacataaacagcaactaaacgagcaccaagttgaataccggcaatatagacaatccacatcaatgtcttcttgctcaaaagctttttatacatagccatcttctctgctctgctaggctccttgtcatctgcagtagaacgataatcacgtggcacatcatgaataaacaaagcccaaacaaaggctaacatggttacggcagccgtaatgtaaagcaggattctgtatgaatttgtataatctgctaaagtttgaccagttaacatctctgacttaccagaaagaacagatgcctcatgataaggaatgcctctaatcaaaccaaagaaccaaacgacagctttcccacctcaaaacgtacagatcgtttgtgtaatcaaattaacaatcattactgttgagaacatcttagttctaatttttcccggaacatatgaggtccacattaatggatacatcaaatcataaaccccaattgctgtccaagaaatagtataagcaatcatgataacgagctggttagtcgtgatacaagttaaagccataaaaatcgcagtcattggcggcaaaatcaataaaatcttgcgataaccccacttgtgaactgtagcgatcattactgacatcaaaatagcagttgccgcattaaaaatgtttaatccagaaatcaggtgtggcgctacaattttgtaataagatagagccgcatcattcgtaatcccagttactgcacccaaaatgccgtagatccataaataaataataacattatgtttgtaacgcggattccagttcttaattgcttctgcctcagcttccttttctgcattacttcgtcgagccatataaatcccctttttttgaaaacgtatacaatacatctaactttattctatcactcaaatggtattaataaagtgtgtgtatacgaaaaggtatggtttatagtttctaggcaactttaggttttaatgctttatcgaaaagattggtaatcaatttcactaggacaccatcaaacagtaatgatgaaatcatacttacaataaacatcaacatttgtacattaacctgataatgactccaaccaaacaaaaagtaacttggtataaaaccacctaaattggcaaagaaagcaccagtcaaaacgctcttccatgagaacttttcatagcgttcttttttagggaaaaagccgatctcgttcattgctccttgaattaacccctcaaaaatagtcaaggctccccactggccaccgatcgccatctcaaccgtggcagccagcaattcaccaatagttccagctcccttagttggtacaaaatacatcgctaaaggagcagccatataccataagccagtaaaaacgttgtcaacaaccggtgcataaccggtgggtaaaaagcttaattttactaagttatacacattgttaaagccataagtgtaaatcacacccatgatgatcccgattaaggcaactaaaataactgattttacattccattttgacgatctagtaaacataaaaaatgctccttactaacatactgtcagtaggagcacacaaataaaagttaattctcttgttagcactttcccttgcgcaagtattatcttgttcaggttcgaagggtattatctcagcattacgcacccctagtgacatttcatttatttatcaattaagtcaagtatagcacattgttaatcaaatgccatttgatctgtgtaaagtttgtaataaaatcccttttctttaagcagtgcctcgtggctgccttcttcgatcacattaccatcttttaacacaacaatcttattagaattcaagatcgtctttaaccggtgagcaatcacaaagcttgttcgtccagcaatcacagtatccattgccttttgaatcttttcttctgttaccgtatctacgttagaagttgcttcatccaagattaggaatggtggattcgttaaaattgtccgagcaattgacattaattgcttttgcccagttgaaaagattgagctagcatcgctaacttgagtatcgtaaccatcaggcaaagtctcaataaaatcatggatattagcctgcttagccgctgaaatcacttcatccattgaagcattcggcttaccataacgaatattgtccgctacagtaccagtaaataagacagagtcctgcaggacgatcccaacattatttcgcaatgatgttagttgaatatcacgtacatctgtcccgtcaaaggttactttacctgaattaacatcatagaagcgatttaacaggttcataatcgtagttttacctgaaccggttggtccgaccagagccactgattggcccttatcaaccgaaatatttactccgtgcaaaatttctttatctttattgtagccaaaatgaacattttctagcttgacaccatgattcaaaccactaatgaccttaccatttggcacttcgttttcatctttttgttcttcaactgtagctaatcttcttgccccagttaaagctaattgaatcatggaataaattgaagtaatttgtgtcaaaggttggaaataaacttgtgaatattcaacgaaagttacaatcaagcccaatccaatagcctgagaaatttgaccggaaataatcatccaagaccccatagcgatgacaattgccaaattaagtaagttcaatccgttcatcaatgggaataggattcccgaataaaattgccccttaaacaaaacggttcttactttattgttgtagaccttgaagccatcaaccgattcttgacgcaaaccattggtaataatcaccttttcaccattgatctgttcggtaatataaccatttaaatcgccaatttcatcttgctgcttatcgatataaacgcgagcttttttcattaaaaggacactaataatcaaaatgaatggtgttgtcgcaatcgtagtccaagccaaagtactattaatcgtgaacatcacaataattgttcccacgaacataattccctgggaaataatttcaaaaatcgcattgttcattgcgttgaaaatattatccaaatcggaagtaaatagcgataaaagtttaccatcctgatgagtatcaaagtagcgcactaacatccgttgaaacttggcaaatagattctcacgcatgtcattagttgaatccgcattgaacttggacattaccatccaagcaataaaaatcgctatctggctcaataagtaaaacaagaacatcgaccataacgcgctatagaacgtgttcatggatgctgtacccttttttaaatcaaccaaataagtagttaaagcggtaactgaacggcctaaatatgtaggtgccataacctgtgcaccactcgaaatcaaagaaaggataaccacaatagtgattcccttccaataaggcttcaaatacttagcaaaatagcgcaatgcctttttcgtattactcatttattcatttcctcctttcttacctttttgtgtcttgaagatttcttggtaaaccggcgaagtcttaagcaattcttcatgcgtaccttgtgccactaatttaccgtcatctaacactaaaattgtatcggcattaatcactgaaacaatcttttccgcaatgataaaagtagtagtatcaggcagctcatgctctaaagcttgctgtactttcttctcactttccgcatccagagcagaagttgaatcgtccaaaatcaaaattggtgctttagcaatcaagccacgtgcaatagatagacgttgcttttgcccaccggaaaagttagcagaacgctcctctacttcatgatcgaaagaatcgttataacgctcaataaattctgatgcttgcgccatattggcagcacgctgcaattcatgtaatttagcctgagcattaccttgacgcaaattagatgctattgtacctgagaaaagaactgctcgctgcagcacaaaagaaacagttttgcgtaatgcagcttcagttacatccttaatattttgaccgccaatttttacttcacccttagttggatcatataaacgagcaattaattgggccaaagttgatttaccagcacctgttgccccaacgataccaaccatttgacctggcttaatcttaaacgaaatatcctttaaagtaggatcatccccatcaggataagtaaaggaaacatgatcaaactctacgctaccgctaagaggtgcaaccgaaccgctttccacaaacttgacatctggttcagtctccaatacctcacgaatacgtccaagagaaatattagctcttgaaaattgcattaaggtcattccggcaatcatgatcgtaaatagcagggttaaaacatagttcacgaatggactgactaccgcaatatcacttggatgtgccgtaatatttttaccaattaaataaacaattaaagcaattacggtataagcgatcatctgaaaagctggcataattgcagagaaccagtaaccaatcacaatgttgtagttattcaattggtccgaagtttgatcaaactttttaatttcttgtggaccttgattaaatgacttaaccactctcacaccttgcaatgtttcttgtgcttgattagaaattcggtccatcatttcttggaatttggcaaacaaactattcatttgtcttaaaacgtaagcgccaaaaccaaaaataattgcaaccatgaccactggtgcccaccagaagcgcggaataatcacgatacagaagataaatgaaccgacaattaaaatcggcaaacgcaacatctgcatgaatagctgcatcatcatgttcattacctggttcatatcgttgatcaaccgtgtagttagagaacctgctgaaaatttcttaatattaccaaaagagaacgtttgaatcttagcataggtatcttcacgtagatcactaactactccttgtgcaattttcgctgcaaaataaacgttaaaaatacccgaaataattgcaattatacctaggactactagccagattccatcagacaagactgcttgcttctgattcgccatcaatgccttttgaatgttttccaataatttaggctgatataatccagaaaacgctgaaaataagatagcaataattgcacaaacaacatcttttttataacgctttaagtatggaagaattattttaaagttttccatttttactcctttcttcacttaaaaaatgccaaaaagtagtgctccattcttctgaaagcttagctaacaatttcattttgtcagttcccatggcttgagccgttttttcctctaactcaaatagaggacgcaacctgtcataagcatatttccgccctgcttcggtaagctggcaaaatcgaactcgcttatcgctaggatcaacagtcatcgtgatatgatcatgatcacgcagaatcttaattcctttgttaatcgactgcttgggtaaatcactcagatttactaattctctttgtgtcaattttccccgaatcagtaattcatacatgattaccactaaatagtccggcaagtcatgatcctgctcccattggctataagcacggctgccatggataattgatagatttaatttttctgtctcactaattttcattacttcaccaccatatttagtctacatgcatgccaaatatattagtatgcacatggactattgtcaaatcattttgtcaaaaataagactataattaaagtaaagaaacaatttttgcatctaaatttcaaattggtataataaaaaaatcatcaagtaaaacaaggcagggattatatgcgtaaaaagtttttattaataatttcaatagtggtcctgtttgctttgccattaagtggctgtaagcaaaacaaaaagcaaaacgtttatcaagcagttaaaactagtaaaaccattaactggggcgtcaaagccgacacgccattattcggctcaataaatattaaaacaggcaaacttaatggctttgaaattgatttagctaatgcattaacccatgaaatgctaggcaaaaatgtcaaagccaatttcataacaacaacggccaacaccaagattcagcttctaaaaaacacgaatgtcgacgccgtcattgcagcaatgaccattacgcctgaacgtaaaaaacaagtcgaattcagtcacccttactttcctgctggacagtcaattatggttgctgacagtagcgccattaaaaatgctaaaaatttgaataacaagaaagtgcttgtagttaaaggaactactgccgccgatgctatccatcaagttgctcctaaagcggaaattttacaattcgatgattacggccaagcttttgccgcattaaaagctggacaaggagatgcctttgtaactgataacggaattttagctgggattttgcgtgatagttccggctataaattagttggcggcacctttaccaaccagccatatggtattgcagttaataaggggcaaaatgacatgctcaagcatatcaacactgcattagcaaaactagaaaagaatggcacatataatcacctagttaaaaaatggtttggcaacattcctggtatgaacattaaagaactagaaaagaaataagaaaaaggctaagatcaaaattttgatcctagccttttcgcttatttagcaatgaaatcaagtaaagtaaacattacatctttatttttctcaggcacaccatgattaataatctctgtaggcgtttgatgtaaatcattattttctaaagcatatgctccatcattaatagcaatctcacgcacattatcaatttgcggttcaaagtggaactgcaacccaattacattatctcccagtaaaaagccttgattcttaactagatcactagagaataataacttagcttcggttggaatttcactcatttgttcatgccaatgaagagctgttaacttatccggaattcctgtaatagtctgatcttgcaaataaactggtgcccaacctacttccttagcgggtgcatcaagtaccttatagcccaaagttttagcaatctgctggctaccaaaacaaattcccaagatcggcttgtgttgatctaacatttgtctaatcaacacacgttcatttttgacccaatcaagatcatcattaggactgtttggactgcctaggactactaatagatctgtttcatcaacagttggcaaaataccaaaattccctggatggtaaacgaacatttcgttatctctagcatggcaccaggcttgaatagaaccaggtccctcattaggtgcatgctgtaatacattaacgcgcatgaaatccctttctcactcaacaatatttttgtttttcattttatactcaattctagtggtaaacaagaagaattcagttaatcttttactgtatctttagaaactatatgtcaccttatatgatataatgttatacatatttttacatctggaggacttttatggacaatcaccttaaacgcagtattggcttaggttctgcactttcaattatcgttggaaccattatcggttctggaattttctttaaacaagcttcagttttagatagcgcaggctcaacctttatggcacttttagcatggattttagctgggattatcacattaaccgccggcttaacgattgcggaaatcggtgcccagatgccttatactggtggactttacgtctatattgaaaaaatttacggccgcgttttaggttttatggctggttggatgcaggctattgtgtacggtcctgctatgatagctgcagttaccggttttttaagtattatggtgactaatctctttggcatcggcaccgaatggcgtattcccattggtttgatcactatcatcgctatcggcggtttaaactttttagaaaataaagtcggtgcagcctttgctataatcactacaattgctaagatgatccctatttttgcaattatcttctgcggcatctgctggggtgagcaaaacgctgtcgcccaaactgtgactgagctgaatcgatcaacaggtggtcttggcgtagccgttctcgctgccctttttgcctatgacggttggatctttattgctaacttaggtggtgaaattaagaacccacaaaaattattacccaaagcaatcatcattggaatcactacagtattagtaatttacgcgttaattactattggtatttttagtttcatccctgccgataaaattcatgcattaggtaaaaattcaaccacttatttggctgacgctattcttggtccaattggcggtaaagttctatctgtcggcattattatctcaatgctaggcactctcaatggagaaatgctcacctttcctcgtattatttacgctatggctaagcgcggggatttgcctttctcaagatttttatcatacgttacacctaagggaaaagcaccagtcattgccactatgctcttaattaccttaactggaattatgatgactttcttcgatcctgattacctatcaaatctctgcgtcttcacaatttatagtttctatgttttagcattctttggcttattcattttaagatacaaaaataaggaccaacgtcctttcagcgtaccgttttatcccctaattcctttagtagcaattgcgggcgggctcttcgttttagtcagccaattcttcaatgatcccgctggcgttttgctttttactggaattaccgctgtcggctggccaattttctttttagttaaaaagatgagcaaagcacagaacacgattatcgaagactaaaaatctcaaatttttcttgttcatttttaataattatgatattctaattaaaattaatttaggagattcaattatgatttatcaagacaccacattggcatactcatctagctcaagttccaactgaacttgagtgattttggtgtacgtaaatcagcagccggattcactcaatcgtttctagacgataaggtgaatccggctatttttgtataaaggagaaaaaatggacaacaagcttaaacgcagtattggtttcggctcagctttttcaattgtaatcggaactatcatcggctctggtatcttttttaagcaggcttctgttcttgacagtgcaggttcaactacaatggccttactagcttggatttttggtggtctaattaccttggctgcaggtctcaccattgccgagataggggcgcaaatgccctacactggtggtctttatgtctacattgaaaatctctatggccgcattttaggctttatggctggttggatgcagatcatcgtgtacggtcctgcaattattgccgccgttgctggttttatgagcatcatgatgactaacttttttggtttgaatcattcatggcgcattcctttggctttaatcacagttttagcaattggaatcatgaatttcttcgaaaataaggtaggtgcaatcttttcggtcataaccacgattgccaaaatgattccgattgctgtaatcaccatttgtggaatctgttggggtcaacaagatgcgattaaccagactgtagcagaggttagtcaacacactagtaacttcggtgttgctgttttagccactttattcggctacgatggctggattttaatcgctaatttaggcggcgaaatgaaaaatccccaaaaattattacctcgagcaatcattgcaggaattacagctgttttggctatttataccctaattacaattgggattttccgcttcatccccgctaatcaaatttaccaactaggcgaaaacactactacttatctagctaacgcggttttcggtgcaatcggaggtaaaattctttccattggcatcatcatttcaatgatgggaacattaaatggaaaaatgctgacctttcctagaatcgtttatgccatggctaaacgaggagatttacctttttctaaatacttagcctatgttactcctaaaggaaaatctcccgttgttgctactttttttatcgtccttttagcccttttaatgatgattttctttgatccagaccacttatcagatctttgcgtctttacagtttattgcttctatcttttagccttctttggaatttttatcctaagaaaaaagaataaagcagagcgtcctttcagtactccactttatccttttgtgcctataattgctattttaggcggtttatttgtcttaatcagtgaattaattaatgatccagctggtgttttactttttgccggaattgtcattattggattaccaattttttacgccgttaagcgcatgaacaaacatcgtttgcattaaagcgacctttctacactgtagcttgctcgccacaactcttccattttagctaaacgatgccaatcccctttttgacacattgtatataaagcatgtgcaggatcataggcaattggattaccttctgtttccttcaaataagctccaacaatgttgattaacatcatccgaaagcgttcaatctcatttcggctaaagtaagtttcaaaatacttgctggttaagcaatcaaccgttgcttgcgaggccttatgcaaagaagccggattcttacgatagttatataaagtataggtcgaaattcctgttgccttacttaaactagtaatcttcacattgcgatcagttaccaatttttctgctctttgtacatcggttaaaattttcggatgcttaatgtgaggaggcatcggaatacgtttgcttaactctgcaattactttttcagcagcttccctcatttgctgagtggctactgtctcacttaccttgtcatcaagcaattctcctacaacgaaagtatgatcagtcacttcataccttctagtaattgcattgtaaaaatggccttcaacccctgtgatcttaactgcatcagttccagctttctcatagtcaaaaaagatgtgttgttgatcaccagttaatggtgaaaatggtaaattatctaacgtaaaaacttgtacatttaaagtataatctgaatgaacggaatcttctgcatcactacgatacattttcacttcccgatcatgaataaaatcttcaaaaataagattttttccatatttttttttcatttcttaatccccttttatatagtcctattatccattataagcaaaaaactagcttttaaaagctagtttttgtttttattagaaaatattcggtttagggcaaataattaccagcagctaagtataaatcgtaccactcttgtctagtcaatcgaatcttggcacctttagcagaatccctaatgtgttgcggattcattgatccaactagcatttgaatatttgcaggatgacgtaaaatccaagctgcagcgatcgcatttttacctacctcatacttatcggccagtttttgcaactcttgattcaacttggggaagccatcattatcaatgaaagtcccttcaaacatgccatactggaatggtgaccaagcctgcacagtaactttgtgtagacgggcataatcaagaaattggctatcacgatcaactgatggtttatctaccatattcatatgcatcccaaagtcaatcattcctgtatgtttcaggctaaattgtaattgattgaacatcaagcgctggctcaagcaactttgtaacaatttaaattgagccgtatcaaaattagatacgccgaaaaagcgcaccttacctgctgcctgtagttgatcaaaagcctcagctacttcttctggatccatcaatgcatctggtcggtgaagtactaatgaatcaagataatctagttgcattctttccaaaatttcatcaacactatgcaaaatatgttctttagaaaaatcataacgttttcctggaacaattcctgttttagattgaataaacatctcttcacgcttgatctgcatttggctaaaagcttgaccaaaaatctcttctgattttccaccgccataaatatcagcagaatcaatgaagttgatcccagcatcataggcggcttgaattgccacttgagcctctggaactgatttttgattcattcgcataatgccaagtgccatcgctggaatgcttaaagtagtacatcccattttaattcgtttcataatgtaagtcctttcattctttatttacctcacatcatgaaccaaaaatagctaagtttcaaccacaagaaattcaataatcttttattaatatatcttagctactgccgattgaattgattctttatctaagaattcgtcataacttgtatcttggcgactaacaatacctttaggtccaacttcgataatgtgattagcaatagtttgaataaattcatgatcatgtgacgtgaataaaattgaacctggatatgaaacaagggcatcatttaatgcagtgattgactcaagatctaaatgattagtaggatcatccatgatcaatacattagccggttcaagcatcatacgcgacaattgacaacgaaccttttccccaccagagagtactttgatcttcttctcaatttcttctccactaaagagcattcgacccaagaacccacgcaagaatgtgttatcatcttgttccttagtagcatattgccgtagccaatctaagattgtaagttcatcattattaaagttagcgttcaaatcgcgtgacatgtagttaaaggccgttgtttgaccccatgtaacggtaccagtatctggcttaagcttaccagcaacgatatcaagcagcgcagtcgttgctaaagcgttacgtgataaaaatgctaccttatcaccaggacgaacaataaaggaaacattatctagaattttttcaccatcaactgaataagaaacattttctaccttaactaggtcattacctaaatcacggtgcatttcaaactttacaaatggatacttacgactagatggcttaatatcatctaaagtaatcttatcaagttgtttcttacgagaagttgcctgacgtgatttagatgcattagcagaaaagcgggcaataaattcttgcaattgcttcatcttttcttcttttttagcattttggttagcagctaattcattagctagtttgcttgattcataccaaaagtcatagttacccacataaagctgaatcttaccacgatcaacgtcacacatttcagtacatacttgatttaaaaagtgtcggtcgtgggaaacaacaatcacaatgttagggtaatcagccaaaaagtcttctaaccattcaacggtatgaacatccaaaccgttagtcggttcgtccaatagcaaaatatcaggattgccaaacaaagcttgggccaataagaccttaactttttcgctttcaggtaaatccttcatcatcatttgatgttcttcttcaggaatccctaatgattgcagcagcttagccgcatccgcttccgcattccaaccatcaagttctgcgaacttgctctctaattcagctgccttaaccccatcttcatcaccaaagtcaggtttggcataaagagcatctttttctttcattacttgatacagttccttgtgcccttgaattactgtgtccatgacagtgaagtcttcgaaagcaaagtggtcctggttcaagctggacatgcgctcattgggatcaattgaaattgaacctgttgttggttccagtttcccctctaacaatttaagaaaagttgacttaccggcaccattggcaccaattacgccgtagcagttgcctggagtaaattttaagttaacgtcttcatagagtgtgcggccaccaaatcgtaaactaacgtcggatactgtaatcaatctctttacctcgcttaaaatataaaattatgtttaagtatatcaaaaaagatggtcccttataatagagaatccatctttttaagcaatttattaaaactttttgaagctatctagcttttcctgggtaatatcacgaataattgcagtagctaaatcaactgaagccttaaagtccttataactactgaaacaatatggtgaatgttcatagcgcaccggaataccgatgacaattgttggcgcaccattttcgtagtaaattgcagcgccatcctgaccgccaccggttctaactgaacgagtatatggaatattatttttatcagctaaatcacatgcatattgttggaacttaggatttggtaaaaatgtcgtatccatatcgcgcaacattgggccacgttttagaccagtttgagaaagccagtcaggcgtaaaagtatcatcagctggacagctttcgagtaccagacaaagatctggcttaacttttctagccgttacataggcgccacgcaagccaacttcttcttggctagaaagtgcagccaccacgtcaaagttagtttcttcacccttcaaattatcaagcacatcaaccatcgcaccagcaccaaaacgatcatcaaagtctttaccgaagaataaaccggacttttcatgatattcgcatttaacatcaacaaagatagggcaacctgtatcaatcttgtagtccttgattgtctcctcacggctagaagaaccaacatcaattgacatatctgccacatcaggtacattattgcgctcagctgctgtcatgaagtgaggcggcttagttgctacaacgctagggatatattctccatcacgattgcgcactttaacgcgcaaggctggaatattatattttacccaaccaccaagtggaacaaacttaattaaaccattagggcgaacagcttgcgtaatgaagcctacagcatctgagtgcgcatcaagttgaattaccggtcgatttcccttattttctttcttggcggcataaacattgaacatcccatctacctcaatatctgccgttttttccgcataactagtaaacagcttaacgaattcttcctcaaagcccgaagtcgaattggcatctgagaattctttcaacatttggatttcttgttctttttgcataatttttcctttctataaaaaacgcttaatttaattttaccgagaaaaacagtcaaagtagactataattaaaaataattattgcaaaggaaaaataaaatatgaaaaataaattttcaatgataattcttttacccctgctttttagcctatcagcctgttccaaccgttctagtcgtcccgctacggttaagcagttctgcgacacataaagcatccaaacaggcaaatgagtttaagcctaatttaaaaaagaaatatcctggctctaagttaaccagcatccccgaacaatttcgcggtacctggtatcgtagcgatccactgagcaaatcagctcgcaaattaattatcaacaagcatacaattggtgactcagcagtttatcgacaagtggataagtccattaaactagatcataattctgagcaaaagaataaaacttattctggtggtgattccatgattgccatcgaacaacatcaatggcagacttggatgcgcgttcgtgagtttttaacaactgtagatattatttatattactggtcaatttaaaggacatcattgtttatatcttgcatattctttcggagatatccacaacgcacttttcaaaaacaaagcactagcaattaagtataaaaactatgacttttctaaaattaaatcatgaaagatattaacaatctactacaacaaaaaagtaacttactcttaaaaattagctcgttacccttaaacctattcccttatttagtattcagcttaattattaaacaaaatactgcaatcagcgtgctgccttttgcactcttctatgcctttcggcgcacaacattgtttttatttaaaggcggcgaaaatgaagataatgttattggctgggtcggtttattggcagctttattaggctatttcttagggattttcggcatctttttaccagccctttaccgcattagcgcatcccttgccggaataggcgccgcatgtttccctagcgttcaaaaacaaatcgccattcaaagcgactatcatccaagcaagaatgatctttttgcttattttggcgcaattttaattttactagcaatagttgtctttgttgaaccacatctgccaacaatttcatttatcgcaatgctcatttatacgctaattgctatactcggctttaaatattctccatttagagcacattcacgggaaattgtattgcagtggaaaaatgtctggttaactctaggtttgctactggctattctcttaattcgagaaggttggaactcgggaaaagacatcttctctatttttggcattatcgtttcagcagtagtcattattaactatctgatcaaattagctttaagccaaaaacatggtaaattatctcgcaaaatgcagtatcgcctgacaatcgcaggcctctgccaagactttaccactatcttttcagccgtttatatttctgttttatttggtgcaaaaaattactactggttatttgtcattatcttaatcgccagctttatcaaacgtccattattaaaaacgctacgtgaatatttaccatttgatgacttcaccattcaaagttggggcattgttctcggtctagttattacgctctttaggccaacatactttgcagggatttttttgattcgaattttctacagtttacaaaatactgacaccttagatcttatccgtgatcatgtcgatacaaatatttatatgatcaactatcgttttcgcactgctggaggcttcttaactcaattaattctgtggggtggcttgcttttattcaatggaccgcacatctttgagcaaatctttaactaccatattaataaaagcgttatgaattctagtcagcccttatttttaactcaattaatcttggtgctattcataatcagctttacaatttatactttaaaacttaacaaagggaataaaaatgaatgaaaaacctatttggaaaaagaatttacttgtcttatctattgcggtctttatcgctggtatcgccttctctgaagtaatgccgtttctgccattatatattgatacactaggcaattttacccataagcagttaaacttttggtctggctttatctactccggtacttattttgtatcggcgataatttctccctggtggggaaaactagcagacaaaaaaggcagaaagccgatgacattacgagcttcattgggaatggctatcgtccttggctgtatggggctagttaccaacgtttatcaattatttattttaagaatgttacaaggtatttttgcaggctttgtttctaattccaatgctctagttgcgactgaaactccgaaggaaaaatctggacaagcacttggcactatggcgtctagctttactgctggcaacttactcgggccatttattggtggagccttagcgtctattttctcctatcgcgttaccttctttattacaggtggtctattattaattgcatttcttttgtcattgttctttgtccatgaaacagacttcaagccagtaactgaaaagaaacttgataaagcaagcggagtaattaaagaattacgctcaccgcaattaatctttggcttgcttttaactactctaattattcaagctgcaaataattcgattaacccgatcgtttcactctatgttaaacaattgatggctaaccacggtaatgtcgtctttatttccggggtaatagctgctttgccaggaattgctacattccttgcggcatcgcgcttcggtgcactcggtgaccgcattggaactcataaaattattattgctggctttattggagccacaatcctcttctttttgactgcttttgtacaaaatactgttgaacttggtattttacgctttttagtcggctttactgatgcttgcttgttccctcaagtgcagactttgcttactaaaaatacgccagcaaaaatcacggggcgaattttttcttggaatcagtcagctatgtatatcggtaatatttttggaccgctactaggttcaactatctcaggattaactaattacagcactgtctttatcgttactgctgggattgttgtctttaatttgattttgtttagatttaatgtgattaaaaatttgcagtaaaaaaagtgtttgagtttttctcaaacacttttttctattccgcagctttctttgcttcatgatgattataaataaagtttgcaacatacccacaaataattagcaacaacgatacaatcataatttctctaattccggtatgaaaaattgtccgcattgttggcattaacgccttaggcaaactcttcgcagattctgcgtcactcaacttattcatcatggtcatcgtaatattgtggtgtccagcaattccacgtgctagagctaaattcataatcaccccataaacggcagccataatagtttgcgctaaaattctaatcaaaaaactaagcgatgtagcaggtgccatatccttttcaccagcgtcaatctgcacttttatttgaagaataacgaagattgagcctacacctaaaccagataacgctgcaatcgacatcaaaatctgatatggcgtactaatcggtacaataattaaaccgattactgttattgcaatcaatgtaaaatcgaaaattaacaaatgataattattaaaatgtctgagtaaatgcggcgtactttgtgaaccagcaatatcaaagattgagttaggaatcaacgtcatcccaccgattaaggccgttgtccctaagattgcctgcgaccacattggcaaataagtgttaactgcaatatatgcaccccaggcaaaggcaaaaagaatgaaatcaccaactaaagctttattagtaaaaaccgataatggcacgataggactagcagcttttttctcaactaagatgaaccagacaagcattacgatcccgataatcacgaaaatagccactagaaaattactagctagtcctaacatctgaattccaatcaaaaagcaagtcaaaccgccaattagggtaaaagcacctagtcggtcaaagacagtattgatgtttggcttgcgaatgccacgataaaaaagaaaactcaagataattgatatcaatcctaatggaacattgatataaaagacccagtgccaggacaaagcatcaacaatccagccaccaactagtggaccagcaatacaagcggccgaaaaactagctgcaatataactcaagatgaccgtcctgcgtttgatattcggataaatatagccaacaatcacataaggaagagaacccattccaccagcaccaacgcccatcagcactcgaaaaataaggaaaaagtaaatatcaggagcaaccccttctaaaactgaacctaaaataaataaggctagtgacaattcgaaggcaaatttgttacccattctttcaccaattttactccaaattggcactgagaccgacattcccagtaaaaaacaggcaacaatccaacccatatactgaattccgtgtagatcggacacaattgctggaatcgccgtattaataattgtcgcatctagccctgacataatattagccagcaacaaagacaaagtaaccattgatatttgcttcttagtcatttaatcccacctttttaactctaaaaactactattactcatagtatgcaagatttaactagcaaaataaagcacaatatttttccactaaatcttgacaatctgtgtttttccgagttaaatataaagaaaataatagtgatgacctttaaagttagtcccgtgaggctaagaaggaaatctgcacaagctaatactttttgtcgttagctaatacagaaggaccatcttgagccatgagctcttggtggtctttttcttttggtcatccagaaaggaaaaactatggcaaaagaaataatcgatgctttaagcatgaaacgcgccttgatgcgaatgacctacgaaattgtcgaacgcaataaaggtactaaagatcttgtattagtcggaattaaaactcgcggctggtacttggccgagcgaatcgccaaaaatttgaaaaacttggaagatgttgaagtccctgtaggggcaattgacatttctcaataccgcgatgatttaccagaggctgagaaggaaaagatgatccacagccaacaacttgacttcgatatcaccgataaaaacgttatcttagttgacgacgttcttttcacaggtcggacaattagagctgcacttgatgcattaatggatcaaggccgtccagctaagattaatttagctgtcctagttgaccgcggtcatcgtgaattgccagttcgtcctgactttattggaaagaatatcccaacggcaatgaacgagaaggtcaaagttgcaatgactgaagtcgatgataaagatagtatcgaaatcgttaaataggagttttttgaatgaataaaaaagaaaagtacagaaatccggaggccgttttagacgtctatgaaaagccggaattcggccaaggcgtactgctatccttacagcatatgtttgctatgtttggttctaccgttttagtgccaattttaattggaattaacccaagcatcgctctactttcatcaggaatcggtaccttggtccacatgctcttgacccacttcaagattccagcatacctcggatcaagttttgccttcgttgctacaatgcaagccttaatgaaggctgatggctacccggcagttgcccagggtgcgatcgcttctggtttagtttacgtagttgttgcgatcatcattagcaaaattggttcaggctgggttaacaaagttttaccaccaatcgtagttggaccaatcatcatcgttattggtttgtcactagcaactactgccgctaatgacgctatgatgaataattctaagtatgatttgacttacttcggtgtagctatcttcactttggtcatgactttagttttccaaatgtgcttcaaaggcttcaccagtttggtttcaattatgctaggaattatctgtggctatatcttatcctgctgcctcggaattgttgatttctctggcgtggaaaaagcagcttggttcacattgccagcacttgatgtgcctggaatcagctaccatttcaaatggtaccctgccgctattttagccatggcaccaatcgccttcgttacaatgacggagcacatgggccatattatggtattgaattcattaactaaacgtgactttttcaagaatcctggcttacacagaacgatgatgggtgatggtctttcaacgattatcgctggtttcattggtggtcctcctaccacttcatacggtgaaaatatcggtgtgttagctatgactaaagtttactcagtttgggtattagccggtgctgctgtttcagcaattatcttcagctttgtcggtaaacttgctgcattgatcgaatcaattccaatgccagttatcggtgggatttccttcttacttttcggaacaattgcatctaatggtttaaagatcttagttgatgatcaaattgattttggtgaaaagcgcaatatgttgattgcttctgtcatcttggttatcgggattggtggagcttacttacaactgggcaatttccaacttacctcagttgccctttccaccatcatcggaatgcttttaaactggattttgcctaagaaagcagctagtgaaaaagctcaagaagaaaagattaagcaagaaaaacaagaaggtaaaatttaccaatagatagaataagccattcaaaaacccgttagttatcgcaatgatagctagcgggtttatttttcactctcactttgcgcacgcaatgttgtaagttgcgcgaaagttggcgaaagttagtgtaagttacgagagcaatagtatataatttatttacacaaataaatttaagtcatgaggtgacattaaatggactttttaaacttcaaagcaattacacaaactggtaattttaaaacaccatctgaaaatgaaaacatcgaatacaaagaagctagttggaaattacctaaatcattttgggaaactgttagctcttttgctaatactttaggtggaataatagtattaggcatagcagaagataagagtaaacatgaatttagtataactggtgtagacaatgttgaagacattgaaacacaaattttcaatgataataacaatatttcatgccttaatcgacctgtaattcaaaataatgatgttcagatctctgtttttcaaaataaaactattattcaagtaataattcatccagaaccctttaatacccgtccaataactgctttcggtaaagcatatatcagaaccggtgacggagatcgagtaactactaaagagcaacttaaatattttacagttgaaagtcaaaacgaaatcgatactcacttactcccttcgacctatacaatagaagatttagacgcagagaatatcaaagaatatcgcaaaataattgataaaaaaggtattattagcactaattctcaacttagtgatcaagaattcttatattcaattggtgttttcagaaaagatcgattaagtaattcaaatgaatatcatcttacagatggtggtctccttttctttggaaaatatatttcgataacagatcgtttcccacgttttcaattagactatcaacaatataatagcgataattctaccaactggaatgatagagtttctgcaggtgatatgaattaccctactttaaatatcttttctttttacaatttagttttaactaaaatagaagcaaatgttcctgatccttttattcaaggtagtgaccttagtagaacgtcctatcacaacgatctaatcatcgcagctaaggaagccctagtcaattgtttaatgcattcatattatgatggtatggtaggtgtaaaaattgtagatagacctagttactttgaatttacaaaccctggtactatgcgcgtaagtaaagaatcatttttacgtggacaatattcctccattagaaatactgaaatcgctagtttatttagacgaattggtgtctctgaaaccgcagctagtggcggccctagaattcttaatactgtattgcaaaataatttaaatgatcctgaaattaacattgattatgaaatcaatactactcgcattcgtatttttaagacttttgcaattgataatcaggaaaaattaactgaaccagagaaatttattatgtcttttgctagcagaaatcctaatttttcaataaatgatattgttaaagatccgcagaatcattttggtaaacaaaccacgattagaaaatatgtaaattcattagtagagaagcatttactatccaatgagaaaattggcaaaaaatatatctacaatttacagaaaaacaatgattatctaaatcgcgttaaacaccttaaacatcttgaagataatttactcaaatagatcattcaaaaagctcaacctacaaaattatgtagattgagctttttcatcttatttatcttcaaatattctaggcttatcgtcatcaagtgaaacatgcggaatttcggtgttatttgtctcaacttgatcgttctcagacaattctgccttcattaactcacttttggctttactagaagtattgcctaaaagtaaagttttctcctgcggcgtattcaccattgcctgtttttctttgaattttttataaacaaccgccgctactgcaccaatagctccagcaacaccgataattgtgccgattaatctcatctttttcatagggatcacctcgtattttgaaatcactttcttatccttaattatatctaattatgaggttgaacacatttttaatgcctattacctaaaactttccgcaatttctggatccatctcatcttctaaaacgctatacccttgatccaaagtcttgatcagagccatatcgtcatcatctagttcaaaatcaaacacatcaaagttttccgctaatctctccctatgaactgacttaggaattaccacataatttctttgtaaaaaccatctcaacattacctgagcagtagtcttatgatgcttttctgcaatcttttgcaagacaggattagtgaaaatgtggttggctccttccgcaaatggtgcccaggcttcaggttgcacgccctctttttccatatattgctgtgatttccattcttgattccagacattagtctcaatctggttcacagccggctttacatcattaaaagtaatcaaatcagctaagcgttcattccaaaaactacttacaccaattgccctaatgcgtccttccttgtatagccgctctagagcccgccaagtaccatagtagtcgttatatggcttgtgaatcagatacaaatcaatataatctaacttcagctttttcattgaatcgtcaaaggcttgcaaagtctgatcatagccatacttatcgacccagattttagaagtgacgaaaatatcctctcgtgggatgctgctatgcacaagtgcatctccaaccgcctgttcatttccataaatttgggcagtatccacaagtcgatagccaacttctaagccgttttccacaacttgttgagtttgagctaaatcatcaatttgataaacaccaaaacccaagcgaggcattttgacaccattatttaaaattacatagtctttcatatttcttctcgttttctagttagttcttgctatttaattttattttaacatagcccatgaaatccgactttattttgtgaaacatagatattatttcttaaaattaagtactcaagaaaagcctaaccagcatccctcaacggaattgccagttaggcttcttttatttttcaacttttgcttgataaaatccaaagctcatctgcttcaacattctagtaaaactatcaatgtctagctttttaccggtagtcaaagcttcaaattcaccatcaggatcaaccaatttgcggtcagtcctgtgaaatccatttctttcatagaatttcaggcgactaacacgctgcttataatttttcgccttcttggtaactggctcaatatcaatgacaatttgcttatcagggaatcgatcctctaacatcatcaagatcttggaaccataaccttgtcctcgcaatttttcattaatggctaaataggtcaaatagactgtattatcattctcagcataataagtaatgccgcaaaactgaccatcattataaattgcgtgaaacttaacatttcggtgtaatgacattgctaaaagagaaaacatggagaatctttcccaagctggaaaagccttcatatataacttcttagcgtcacgatatgcttttgtgccccatcgggcgggtttagagtctaaaatagtatccttcttttctaattaaaaattgattgttaataactctgaataatattattatacaaaaaaatttcctgaattgtcaaattaagtgcaacagtgtaagtgtcaatgtttttgcggtagcctttaaaccattagtctaaccttaatttcttaaatatttatatgacttaaatttctgcttagcttgcttaaataactattgccagctacctgtgcggttaatgcgccatgctggatgcctaaatgaacttcatgacgcttctttaagctgtcacgggccgctgcttttaattcctgttcagtcaatacagttatttctgaatcttcaaactcgctgctaagccaaaattccagctctcgattcttgatgcagcttaagatcctaagcatgccttctgctccagattttgaccatttcttgccttgccccttaacacggtaggtatacttgcggtggttgctctcgcagcagccaatggctttagtcacagtcagttttcgtttcttaaacggcttaatatcgtcccaatgacgatcaatataattccttaggcgccccagataatcatgattgagctcggtattcaattcatcaattagtcggctttctgcagtggttaggatagttttaactttgtcatagctgtatttgtattccaaagcagaaatcagcttgccttgcaggtcaggcgcaaaatatagcctttctttgattttcttatttaggtgaaagacatccaagaaatgctcatgacgcttgcatagccctacaatgtcatcgaagtctgttttggcatatccagcaccgccatcggcgttgctaagaattacagtatcagaaagatcataagtattggccaggtactccttggcttcgttcagcgcatcaagtcggcttaaagaaacaaattccttggcattgattcgctttctgcgtttcttgcttatattgacaatgccttcacagacctgatagcgatgaaattccaaccggcttttagtgcctttgatcaccacgccatcgccttcaagatacaaaactgggacctttttcttagtgcctgcggcatcatatcttgaatctgcttcttggcccgctttaatatttttcccggccatttttaccaaattgcccacctgcatatggctaatattaaagccagacaggcaattgactgctagagcagtattgcgataagtggcaacgctgcttacttctaagatgtttttgactgctaaaatactgtagcgcttgtatttgtcaaagcccattaattcatccaagggataccttgcttgtttgcctgggcatacatatcttcttctgacatacctaacttcgccaaaagccatattgattgagcgctcattcttcttatcaatctgatagccctgtgctttaaccttggtaatcatttcatcatcaactttagctaaagccaaggccatgatttccttaatcaggtttaagaagaaacagattatttttctttcacgcttaatataattatcttcagactttataatatttgcgatttcagttacaattgaattcataaaagaccagcttctaatgtgttttttgttcttaacatcagactactggtctttttgtttgagctcaagtccaaattcaaaggacttgggcttttttaattatttattcaacttaccgtaaaaaattatacacttaggcaacagttaggttatgaagagatatattgcttgaagagttcctctgctgtgtgatattggaggattcggcgatatttgtggttaatggcatcagttgcctgttgaacataagcttttgacttgtctttcatgctcttgcccttagggaagaattgacgcaaaagaccattgcagttctcattggtgcccctttcccatggagaatatgggtgagcaaagtaaatctggcagcccttgatcttggtcatatccgcaaactcagagccattgtcaaacgtgattgatttaaaccaggcaggatgtctgtcaatctccttttgaagcagcctttggcatgtgcttgcccgatagtcaggaatcttgataactacttcaaagcgtgtggttctttcagtcaaagtcattaaagcaggctgattcttgcgtctgacgcctttaaccagatctccttcccagtgcagcggagcttttctgtcttcaacctccttaggacgctgttcaatggaattgccaagatgcttcttgtgcaaagcgtgaccgccatggctgtgatgacgcttgttcctgcgtcttttgagcttcataggcagatcaatattgcttatgtccagcaagccctgatcaatatagcgatagacggttggtgtgctgggacaagggtagcctggcatagtccttttgaattcaccaacgaactcatcgatgctggtggcatcaaatttagctttaaagcgtctggagagcattctcaaaaagacagcataatgcttcaatggattgcgctgatagcagtttttgcgacgcttctcataataaatctgtgcagtatcagcgtaatagtgctcatacaataaatagctgctgtctctttgcaggacgcttccgcgtttgatttcgcgactgattgtcgacttatggcagccaacttcttgagcgataacagtacgggaagttatgccggaatccagcattgcttgaatttgtccacgttgtacgctggttaattgatgatagtgcttagaaatgctagaatttgaattggtcatgaagatcttcctttcttgatttttcgtcacttcaagtttaggtcttcatggcctttttgtttaacacttagtgttgcacttcaattttaaatccgggtacaaaaaaatttgatagtttcttaaaattattttatatccgttcaagctaatctaattcaaattagtttaatttctacctcaactttaacctgtaattcaaattaattttaatctcttaagacttttgagataagttttaagttaacttgaatttgctgaaaattttactgctagatttaaataaaaagaaagcttgtcatctaaccaatgtcattaagttaagacattgacaaattatcgacttggacttttaagatcattcatttgtgatttatcgcatttgaatgatcttttttcatgccaaataaacccaaattttgtttagaaattaggctacacgatataaataatatacagctgatttgggtttgagatttcttttgtcttttcgtcctggtctgatcggaattgtgtaatgactaatttgaataagaatctttttaaagatttcagttgaagaagaaattatatacatagcctggatgacaaaacatgactgtttgaaattgatcgcatattgatacttgcagtttttttgtggtacatatgcttgagcatcaatttgactgactgcgttaaacataatcatgtgggcatagatctccatttcaataaatctatcctgcttggaatgaaactgtacgctacctaaagcatatttcaactttttgaatgaagtttcaatgccccagcgcaaatggtagatctctttgatcctttttaagggataatcggctctatttagattagttagaacaacttcccattcttctttgcctgatttaggatcattaattctaaatttacaggcacgaaattttattgtacataactctccaaagtcccagctgccatctttggtatttttagaccgatattttatatattgacggtaatgatggttaaccaaatgaacgttttctgtagccttatgggtttcataataataattagaggtagtcacccagcaagctatatccttatcacactcttgattaggcaactcagctacttccttaaatgcgccatatcccgttttagtacgtatgacataataacagttaggcaggcgattacaattttcaatcatgttaaagccggtataacctcgatccatagtaactatatatggtccgcaatttagctttttaagcatttgaatggcggctttacgttcatccatctttgacttaggctgaaagatgcagtcttgataagtattatttaacaggtcatagagtgcattaacatgaatttggcaatatggctttcctttatgattgagatttccaacgatattctctgatttaggattccagatttgattaaaatcagacccatcaatggcaaatatacgatatttatgatcaaataactggatattaaataaattctgattaaatacagttagaatatgcttaaaacatgcgggtgaaagctgacctttgcgttggacataagcggaagtactgactactttatcgttatttttaatagctttttggccaaaagctctaaacaactcactggtcaaatcttttccttgcatattaatagtagttttaatgactgtagctgcatctaaaaaccgcttcctagtgaaggcatgaggatcatcgataaaatcatgaatatgctttccagtatcattgataatttgatcaagacgatctaaaatatttctgtgaagggctttcataattaacaccagctttctggcaataattttgaaggtttaataatttaatcagagggcgaaaaggtaggttcttttcgcctttattttatgcaaaaaaagaaccaaatcataatgattcggttctacagagattagattcaatttgtcaatgtcttaacttaatgacattggtcatctaacaaactttcttttttcatataataatcgttaactacatcaacttatatttcttcatcaattcttcaatatatgtgcctagaagttttatactgaaatcttgttctctctcaactttgatataaatttggcttccgcgccaaatttaaggatatgcaaagaaagacgcaattatcacatttttaattaaatatgagttaattgataatgagctgcaatttgagaaactttgcatttatcaactatttctgattcactcatgttttttattctttcatatggcatcaataattcaccggcaaaacattctgcttgccattctggatttttatatattggaatttctccatttcttctatatagagtcagtgaagaaggttgatgtaatataaggtgtagcaactcatgtgctattgtcattctatcacgtccaacatttctaatcgctcccatgtacaccgattctttaataagaattttatccttaacgatatcagtttgtgcctgaacatcatattctaattcatcattgtctacaatttcaaatgaaaaattaggatctaattctgatattttttctagtacacgcgtaatatcaatataaagttgacaaggatttatccctaataataatcgtacatctctagctaatgctcttaaatctttacgagattctggtttaacttcaaatattgaatcataactaattatgtctctcaccttctttcaaaatcttctgaatttgagctatttgtttatctgtcaaatcatcaaattttcttgcaaacatcaatgtagcttcctgcttttcaggtgaaaatttagatatatccaagctttcttcacttatgctcaatgcatcttttagctcttgttcttgctctctatccaagttatatctatcaacaatattattaattaatgatgcggaagccttcttatggccattttcaacaccagataaaaaagccgagcttaccccgacgttttccgccatatcataaagtcgttcatctcgatctaccctaagttttctcaaaaattttcccagtgctgtataagtcatagtttactttctcttttctaatatttactttctaaaatctttattataaataatctcattcactgaaagaagatcatatcttttaacatttaaataaattatactattactttcttttgtatcataagctggcaaataaaacagatcaccaacggagttaaaaacctttctaaattttacaccacctactttctcttgacctataactttaaattttgtcccagaaacagaatcactcaagtcgcccaaaatactaattctacaactatacctgttgcctgtttttaaaaaattgaacttatcatctcctaaaatatctgaatcatcaaacacagtataactttgattcgttttttgactctcaagaacaagatctcgagtaacttcataattaatgatttttgttaattcatacatagtattttatgcctttccaatcggataaaaactggaaactgtcaaatcttttgtgtaaatagttctttctcgtaaattgattttttaattatttatttaatcaaagtaggattctaaggtgtcctgaacctgaccaaagcctttatgaattcgattgaaataacggtcattgtagctcattgcctgaatgccaataaaagcatcaagcgactgttcagttggaaactctgccttaggcttagctttgcgcttgatcacattgttaaatgattcaatcatgttagtcgaataaattgaagctctgatctgcttgggatagttataaaagaccagcagatctggttctatgtctttcaagcttctgataacatggctgtaaaccttgccccatttggtatagaagtcatgcaggacagctgtggcttcttctttgtttgtctgttgatgcacctgtttgaattcgttcatgatcttttcacgatcgtcgacgcgtactttagcgcagatattgcgcatgacatgaaccaaacagcgttgaaaatgagctttaggataagtcctggccaaggctgttttcatgccaacaacaccatcagaaagaaaaagctcaacttgctttaagcctcgggatttcatgttttgaagcatatctgtccagacttcaatgttctcgctaggtgcaatgcagtagtcaatgacctccttgtgcccattaggcttgatgccaatggcaatatagactgcttcacgctcaaatgtttctcggcgcaaaggaaggtatgtcgcatccaaatagacgcagaaaaacttgtcgcttagcttgcgtttgtggtaagcctcaacctttggaatcatctgcttggaaatatttgatacttgggctggactgtaatggctgccatacatcttttcaattagatcggctatttccctggtggtcacgcccttggagtaaagcttgataatcatgctttccaagatatccgagtgctgcttgtagtcaggcagcgtgtgctgatgaaattgaccgttgcgatcccgaggcacttgcacttcaattgggccaaattgcgtatcaactttgcggaaataagcaccatttctagagttgccagtattccagccatttctggcatagggatcatagcccagaaaggcagtcaattcagcttctaacaagttattaacagcctgttgtagctctttgcgcaataaatcatttattttgtctggattgaatagagcttgagcaaaatctttggtaaaatcattcatgaaggagttcttctttctgtatgtgtttttttgttcaaaccaatcatacgagaaaggaactcctttttctaatgtttaaagaaataaatttaaggaatcattcatccttacacaaactattttacagtctcaaaaactgacgatataaccattatctccatatgctattaaatatatcattccattgtgattatatataaaaacatctgctagctgtttaccttcttttctacttatatgtttaattggctttaattgaagaattttctttgcaagcaaaggaatattagtgtttgaaccaaaatcttttccatgccgagtttttatatgcaataacccactttttaagtttcctttctccagccacattaatttaccagcatagtttttcgtaatcatcactatatctgatttattatacttagcattactgttttctaattcatgcatcaaatctttaggctttagtcgttcttttgcaccattagtattaatataccctttataaccacttcccatcagcaagcctccttagcaaaaatttcttgccatgagggatatcttataaatttaatgtttcttttatatggtccaaaaatatcatcgggcatcgtaccataaaccaaaacttttttgggtctaactttttctagagcaatttctaatccagcttcaaataatattcttttttctttatcagcaatttgcccatatgtacccactgaacaaacttgatgcttaggaattccctgaaaaacaaaatcatatgatcttttatcaccccaacgtaaatttggaataatatttaaaccataattttgtaactctagagcaactctatttttctcatatacagcaaatttttgtaacactaatggttcgtcagcataaatgctataatcaggctggactacagatcctgcttttaacaatgatggaacaagtttagcaattctttcatcctttaatttagattcaaaacttttatcccattcatagaaacaaatagcatcatttaatgacgctatttttctgtcagaaaaacgaatcatttgaaaagggatcactaaatcttctttttgcttattcagtactgggtattcatcttccccagtaaaattagcattaagtaagttggacaatattatctcctcacattctactaaaaatcgaagagaaacatggtacactaaatatggttacagaagtatacttgcttctcttgcagcgattgtttcagcaatcgctgtattttatttctgttttcagttaatattattaacttatttagttaatttgtcaaatataaaaagaaagtcttgaactgagacctaaaagttagacacttttaggtctttttctacgtaaagtcaagcataataagaagtttggcttcattttttgtttaaatttcaacttaaacatcttttagtgtcgatttatttttttagttagacacgacaaataagcccagatccatatctgatttttgggcttagcgttataatgtacttgatcaattaattacgactaaagtctttttgattatgtgtggctacgttgtaatcatatggttgatcattgataatcagggcataaatggttctgattagtttatgaattgaagcaatagctatctttttgaaccctttggtttgagaggatagctttttgctttcataataatctgctatatgacacggatttgtcttagctgcattatcaatttgtccaatagctcgataaagcaacttacgtgcgactgcattgccatgtttagtaatacttaaattagagtccatttctcctgactgatatctgcctggatcaattccgataaaagcattgattttattaggattactaaatctgcgtaaatctcctaactctgctaaaactctgacagcagtggtctgtgcaaagcctggaatgctttctaggttttctaaatcatgattaggcaaagacttcgctaacttaaccattcttgcgattaaattttctctttgatcacttaaattaagcaatctgtgtgcataatactgcacttgctcgacttctatgctagagcaagatacaacttgataagcttgataagctaattcaattaatttatctgcagtccttagagcgtgtttaaaagcaatcccctttaagctcattaaccagttaataagctgttttttatcttctcttcttactaagtcacaatgaggatatcgcacaactatttgccagtaatttttacctctagcagaagaaaataaattttcaatttcaggaaaagtcgattgtagagcttggtgaagtcgatttttagctattaccaagtcacttgtcagctggtcatagaagcggctcaaagcattaagctgcttataagtttgggattcgctttgattaaccggatggcgataaagtctttgaattaaagctaaatgataagcatcagttttatcggtcttgttgtagcgtagccccatattcatctcttttttggctttaagcggattaataacaacatattcatagccgtagtcttcaagaaaagcctgcagtctgcgtgaataaacaccggtagcttcaaaaataatttgcggatgtttagaaaaagcggttaattcatgaagcaattgaataaaaccaggacgattattagtaatggttagttcatttttgctttcaccaattagttcacaaacagtagaagtagacttgcttacatcaattccaaaagtaacttgcataataaaaacctccaaaacttagtagtaaaacgtatttacttaagaaatcagatctaattttctaaactcgacatctagtgtccacattcttcgaagagactattgaaaacttaagtaaaactgccagtttattatgcgacatcaagtgtctaaagacctcagggcatatcgttttactactactttaattctacaaaagaataaaaatagtgaatcaattatcccgtcggataactaattcactatttagcttagaatgtttactatgtctaaatttaataaagaacaaaaaatagaaatttatcataaatggaaagatgaaaatatctcaatcagtcaattggctaaagcgtacagaatgaatctagctaatttagactatatgcttagattaattgatatgcatggaatagaaattttaactactaaaaaccaaagctattccaaagagtttaagcagcgaactattgaacaagcaatctttggcaataaaccatacttacagctgcctttggaactggggtttaaaagtattggcatgcttaacaattggattagagaatataagaaaaacgggtataatgtcattatcaaacagaaaggacgccctgcccgtgaccaaagaaaagcagaaatctcgcaaggaactggagaaagagatccagcagctgaaagaagaaaacttgcgattgcgtattgtgaacgaatacgtaaaaaaactaagtgccttggaccaagaagatcagaagaaatagctagggtgattacggatctaaggcaagaattcaaagttagtttaaattatgtattagctgcgattgcagagcaccctgagctacctataattgccagaagctcatactacaagattatcaaacgacagcccgtcaagcctaaacggtcaaagcttattgctagaatccatgagatttttaatcatcatcaaggccgctatggatatcgcagagtagctttgcagttaatcagagagggctggaaagttacggagaaaaccgttcgctattggatgcataaattaggtcttaaaggcatcaggcgcaataagcgcaaatattcaagctataaaggtactattggcaaaatagctccaaatttaattcatcgtgatttcttcgcagccctgcctaacacaaaatggtatactgatatcactgaatttcatcttaataatgaaaagctttatttatcgcctattctagacggctgcggtggcgatatagtttcttatactatctccaaacatccagatatggatttagtaatgacaatgcttgacaaggcttttgccaaagaaacagctcttaataactgcatttttcatactgatcagggctgtcagtatcaaagccctcgttatcagcgagctttaaaactccatggtattactcaaagcatgtccagaaagggcaactccatggatgatgggctaatggagaacttctttggcctgctcaaaactgaaatgttctatgatcaagaatacaagtatcataatcttcaagaattaactcaagcaatcgaggaatatatcgaatactataacaacgaaaggataaagagcagattaaaaggcttaaccccgaaagagtatcgaagtcaagcctctattaatccaatattttaattgtctactttttacgtctcagtacatctgtcaatctaacaaactttcttttttcataaataatcgttaactacatcaacttatatttcttcatcaattcttcgatataagtgcccttaaccttcttaagcatccctttaattgcaaacttttcaggcattggcaaatcaagatcagccaacttcttctggtcattcaggtaatacatcgcattcatcaacattctgacatcaaatgcggaagcgaagacttctggtacaccgcggtcaatattaagcaaagtgtagacagcttccattgccgtccgaactgaatactctgtcgtaaagacagtgtctcttggagtttcggcaaagttaccaataaaggctaagttcttagaatgatctggaacaacctttgggcggtcgcctaaagctcttggcataaagtaagaagtaatatatggcatgtgaaccggaattgttgtagctgcggcagctatttcaggaattctttcttccggcacacccatgtgatagagccactcttcacacatttcaagcccattacaatcaggcatcgtcttttccacataattacctttggtatcagagaacaaaccatataaccaaacaatcaattcatttggtttttgcgccttaaagtgtggctgacggctgattgagtaacctaatagccaattagaatccttaatagtagttggtccactagttacgattgagccactgtgtggatcctttttattaacagcttcaataaatggcacaacatcatcattcttaaaggtaatagttgcagacatccgccagttagcctttggaatatccttgcaaaagacatcaggatggccaaagtcttcatcttgagctgctaagttcttccacaatcgccagcttgcacccaattcatgttctgctggagcgggatgcagttgatctccataggtagtactatcagtaattgaaccattagtaacgaagactaagtcatttggtgttaagtcaatggtcttcttttcgccatcttcggttaaaataatttgtttagcaaccttttcgccgtcagagcggttaacaaagatattatcaaccaccgtattatagtggaagattacaccacgatcctttaaatacttgaccagcggcaaaatcaatgattcatattggttatacttggtaaaacgcaatgatgaaagattcttcaaggttgctacatgctgtacaaagcgcatcaagtagcggcgcatctccatcgcacttgcccatggttcaaaagcaaacattgttgaccaatataaccaaaagttagattcaaagaattccttagtgaagacttcattaatcttcttattttgcaagtctttttcgggagttaaacaaagatcaacaatttccttcactgcctttggcgttaataaaagttgcccatcagtcggcaaagcttgaccacgatttacaattactctagttttagcataacttggatcttttctatttaaacgatagaaggaatccaaaatagattcaccttcatggtcaggcgaagggattgatctaaataaatcccacaaacattcaaagtgcggctccatttcacgaccgccacgaatgatgtaactttccttttctttattatagatcccatccattgagccaccaggcagacctaattcttcaaaaatgtgaattttctcgcccttcatttgaccatcacgaattaaaaagacagcagtagctaatgcagccaagccactaccaacaatataagcagatttttgatcaacatctttaggtttatcagccttaacaaaggcttcataattgccattactataatgcataattgacacttctttcaataatcgttacacttgtaactatttacgcttataatataatgtaagcgatatcagttgtcgaacattttacatttggggatgatcttgatgaatatgaagagtctgcatacgcagcaacaaattgaacatgcattattcaaattactacaaaaaaagccttatacggagatctctattgcagaaatcacccgtaaggctaaggtatctcgtacttccttttatcgcaattatgaccaaaaagatgaagtcattgcgcaatttttatttaatcaataccataattttatcgctgatattgatcaacataatttgagaacttttaagcagcagcttactgcctaccttgaattcttcaaagataatcctcaactaatgaaattactgcttgatgcaggatttgaaagagaattacttaattttcaaactaaatatttgaaaaagctgatgtcagtttaccattctgatgtccacctgcccgactatgcaatagcctatcaatctggtggaatctatatgctgttagtctggtgggttaagcaaaattatcagaccagcttgactgatttaatcacttatgccgaaaaacacattatgctgtaactaaaaaagaagagctcacaaatcgagctttcattttcaaaattattgcaatttcttgcattttttaccaaagttaaagtagaaattcattacaaaggcgataattaacaaaatcaatgaaaccaacataatttccttaataccgccgtggaaaatagttctcattgttggcactaagttttgcggcaaactcttggcacttcgcgcatcactcaatttattcatcatggtcatcgtgattcccttgtgcgtttgaactccgctggccaagttcagattcataattacgccataaacagcagccattactgtttgagctaaaattctgatcaaatatgaagttgaagtggccgttgccatattctttagtcctgcatcaagttgtacctttaattgcaaagcaacaaagataaagccaaccccaatgccagaaaatgcaccaataaaggtcaacatctgcacaggcgtatgtatgccagaaataaacaaaccagctgatgagataatcatggcaactattccaatcaaaactaatttaaaggttgtcatatgctcctgaatcgccgctacactttgagatgcgataatttcaacaatcgaatttggaattaacgtcatcccaccaattaaagctgacaagcctagtaatgcctgagcccacattggcatataggtgtttactgctaaaaaggcaccccaagtaaaggcaaataataaaaagtcgccatctaaatctttatttttaaataaagaaattggaataattggattgtctgcatgaccttcgcgaataaagaaaaagacgatgaagactaaactaattataatcaatccaattatgatccagttagcggttaaaccaactagttgcacgcccatcaagaataaaagcagtccgattactaataaagtagcaccagggatatcgaaaaccggtgtcttttttggagtaaccggtttgtagtaaattaaacaaatcaaaaatgcgattaagccaattggaatattgatatagaagacccagtgccaagagaaagcatcaattaaccaaccaccaacaagtggccctaagatcgcagccccattccagctggcagttaaatagcctaatactttggttctagttttaatatttttaaacacataaccagcaatgatataaggtaaagaacccataccacctgcaccgattcccatgataaagcgagagcacagaaagaaaataatatttggcgctatcccttgtagagccgatcccaaaacaaagagtagcagtgaaagctcaaaggctcgtttgttagtgattttctctccgatcttggtccaaatcggaatcgaaatcgacattcctaataagaaaattgccacaatccaacccatgaattgaattccgtgcaaggccgcgacgatggctggaatagcggtattaataatagttccgtctagccccgacatcacgttgccaagcatcaaggctgccgtcaccattgtaatctgttttttattcatgcttaacttctttctatggtatgtaaaaagcgttagacaaaaatttctaacgcttttgagtaaaaaaatatggaggatacagggctcgaacctgtgacctcctgcttgtaaggcagatgctctcccagctgagctaatcctccattatggggcggaatgtgggaatcgaacccacgcatgctggatccacaaaccagtgtgttaaccccttcaccaattccgccatcaacggtccatatgggatttgaacccatgatctcctccgtgacagggaggcgagataaaccactgctccaatggaccaaactagaggaggatgtgggatttgaacccacgcgcggcataaccgcctaacggttttcaaaaccgtccccttaagccacttgggtaatcctccatagccgaacagatactagtataccaaagtgagaagataacgcaagaccttttttaaaaaaaagcaaaaaaataaagcctttcggcttcattaactatgtaaatttttctggaacagcaaatacttatattctttgccagcaatttcaataaaacgttgagtagcaatattacgccagccaaagtgcttaaagaattcttgtgcatctttatcttcagccagacaccacaagtaaatcttgccatagcccatcttcttcagttcattttctgcggcatttagcaaggtcttacctacattgtagccttgaaaatcaggtttaacatataatgccatcaactcaccgcagccaagcattctagtgtcacgtggacgaccatagctaacggctgcttgaacctcgttattatcgtctttaaaaactaaattatgacgaccactctcattgagtcgttttacccaagcagtagccggaatattatccaaaaatacatctggtagcacgcctttatacgtctcttgccaagttgtttggaaaagcttacttgtttgttttgcttcgtcttcactaattaatggtttaataatcatatttacttcttctttgtcaaaacagtcacagcctctacatgtggcgtttgtgggaacatatcaacaggatcgattcgcttaaattcataaccttgttcttggaacaaaagcaagtcgcgaatcattgttgcaggattgcacgaaatataaacgaccttcttaggtccagtcttaactgtcgcattaataaattcaggtgtcaacccttttctaggtggatcaacaaaaaccacatcggtcttcataccctttttagcccaacgcggcattatttcttcagccttgcctaagtaatactttgcgttttcaataccatttagctcggcattgtccttggcatccttgatcgcatcccggacaacttcgattccacgcacggccttcacatgcttagctacactcaaaccaatcgttccaattcccgaatatgcatcaattactacatcatccgaacctaaatctgcttgcttaatcgctaaatcatacaagcgcggtgtttgcagcgaattaatctggaagaaactttgaggtgaaattctaaactttaaatcaccaatttgatcagtaatctggtcattaccgaaaactaggtaatcctttttacccaaaatcacattggtcttcttaggattatagttcaagactaaacctgaaaccttaggaatctggctaatctcagctgcaacacccatcatttgtgggaaatccttaacccggctgaccaaaataaccattatctcgccattagccttactacgacgcacatcaagatagcgtataattcccgtattgtttacctcgtcataaggcgcaatcttgtacttgcgcaacacatcacgcactgcaaccaatacacgatcaatttccggatcagtggtaaagaaatttgtcaaaggcactaaatcatgtgaatgtcgtctaaaaaagccaatctcaagttgtccattatattctcgcacaggaacttgggccttgttgcgataccctgtttgctcaggactaggcaaagtttgtcctacttcaatctcatctaaatgtgccttcttaagtaagttaacaacttgattacgcttgaattcaagttgcttatcatacttgatatgagctaaagaagcgagtcccgtttgaacccattgattcaacttgatcttaactcgatcaggactttctttttttatttcttcaattttagcaaaagcaaagttcttcttaacctttaaaatctttgcactaaccacttcacctggaagtgcattagtaacaaatacggtcattccctcgtaatgggccacacccattgcttcatacgaaagatcggtaatttctaaatctataatttgattctttttcatactcactcaaccttaaaaaaatagctctctattattataatacttgaccaatctttgtgcttcaaaaaataatcgactgctttttagaaccaactatcacccatatacgcatgcaaaatgtggttagccgctactttcaacctcaaataattaatattattagaaaatagcataatcatacgcttggtcttgtaattcgcaacaaagcagcaattataaccagggatactgccattagcgcgaatgatgtcaccattaaaatacactccaccaaaataagctaccgtctgatgctgggcttggtggtaatactcgtttaccattttaggatttttcagcacatcgttatatacaaacttccaataatcaattggtgacatgaataagttccctgctccaaagtccgacgacgtcgtcactgtcacttggtgccagtcaacatttttactcattggctgagggatctcgttttggttaacctcagaaaaatccttaactttctggagcttaagtggcttagcaaaatcggtctgaatataagcattataacttaaattagtctgcttgctaataatagctgctagcaattcataatcaacatcttggtaatcccaagtatgaagatgatcattctccatgtgattaagcatataagctatttgctctttctgatttttaagcggagaagatggtcgagcattgttaaccaagccactagtatgattcatcagcccatgaattgtaatatctttactacctgaaacttgaggataatagttagataaagaggtattccaacctaataacttttcttgttgcagctgataaattgcagttcctgtcataattttttgtagcgaagcaatcggaaacaattgattagcgttaactatttggcttgaatcagtggtctccttattttggacaacaatcggttgcccctttttatcattaattaacattacaccgttgatatgatgaaacttcatataatcatgcagctgttctttctgattcttaatgccattatccagcttatcccctggctgcacaatgaataaaaatattgcaaaggcacaaagtgccaaaaagatggataaagctcgttttttatgcataaagattcctcttaattactatcccaagcaatgtaataactatatttcttcaattgtaaatctagtatctaggaagactcaactatttggttaatttttgcatctaaaaatattttacttaaatctattgacatacttttttaatcttgctatcatattgctcaacaagaaacgaaaagtagcaactttgctcagcgttcagagaactggtggtagctgcaaaccagacaggcaaagtttgacgaaatacgtcgttataatgttgttcggaaaaattcagaaccgttaccatctgatagagattcaagttcttatgcttgaaagagtgggtggtaccacggctattgtcgtcccgttgacttaggtcaacgggattttttatttggaggaataaacaatgaaaaaagaaaaaatttcctttacagaatcaatcattatcctgatagctctattagctatcctcggcattgctgtaatcaaatttagtctctcaccagaagtgcctgttttatttacagtccttctacttactttctgggctagattacgtggcttctcctggcaggatgtccaagatgggatcaaagaggggatcggcgttgcaattattccaatttttatttttattttaattggtgctttaatcggaatctggattaaagcaggaattatcccttccattatggtcttaggttttcacttaattagtggcagcttctttgttccatctgttttcatcgtttgttctatcattgggatggcaatcggtagcggttttacgaccatctcgactgtcggaattgcgctttttggcatcggtactagtatgaatattaacccagcattggttgccggtgcaattatttctggtgcggtattcggcgataaaatgtctccgctatccgattcaactaacctttcttcagctgttgctgaaagtgaattatttgctcacattaagaacgtgatgtggtcaacaattcctgcatttattgtttcattaattttattctggattttaggcaacagtggtcacatggacctaaccaagatcgaacacacttctcgtattctccaagctaactttagcatcacgtggtgggctcttatcccgattattttaatgattttctgtgcatggcgcaagatcccggcaattcccaccttatttatgaacattgctgtcaccgttataatgatttttattcaaagcccacacgaatcaattcaatcacttaataatttagtcatgaatggctttgttgctaaaaccagtgataaagcagttgacgctctccttacccgtggtggaatttccagcatgatggcaactgtagcattaattatttctaccctatccttagggggaatgttgatgaaatttaacgttattcaaagtgccatggagccgcttgtaaagcatctcaagaaaccaggtcggttaattacagtcactattttgtcaggaatctgcatcaacctttttgttggtgaacaatacttatcagtaattttacctggacgtgcctttaaacctgcatttgataaaattaagctttcaccattggcacttagccgcgtgcttgaagatggcggtagcgtaattaactacttgattccatggggagttgccggttcatttgctgcctcaactttaggcgtacccgtcttacaattcttaccatttgtcttcttcagtctgctttcaccaatcttctctattttaagtggaattactggaatcggcttgaagtgggttaaagaaaagtagaaaataatcttgtgaaaaaagttcctaggatagttgtctttaggaacttttttacgcaatctattagaactcaggaataaataatgcaaattaatgaccacaaaagtaactggtagttagctgatattggtgattatcttaaggttatcgctaatggatgtgtcatgttacagccaattattattcttttcttgaccttaccatttggctattcgcaacaactctttttggcatcgctttataacctagtcaaatttacgtcaccagccttcagcaacatggtcattttcacaatgttgcttcatttatttggcaatttttcagtggcaatgctgcacctcatctttggtacagtgtcatgatgctgcaatttttacttattatgccttggattaaggctatctgtaactgggtcaagcattcttattgccgcctagcagttgcagttattagatcgtatcttcatcagctttctaatttttgggctctacggtggtttaagctggaactttcatcatgaaattcagacttttctatttaaatattggtagctaattgttggaatttatcttttaacttacttttggaccagagatttatttttagctacttccaaattaacagatctaaccaacgacagttattacctaccttcaatggcaatttatgctttagctgttatattcttgacttacctaatctgtattgcacaaaaagtctttaatatgaaccattggctaaaatcaattcattttctagctttttatgcttatcgagcatttttagccaatgttttttgggatcggatcttttggcaatattttaattttaaacagctagctttacaaaacatttatctagctgtcttactactctggatttgcacatggtgtgcttcatatttatctgtttatgtaattcaccaactttggcttaaaattaatgattctgtcgatccatcctaatttgcgcacgtcgatattcctgactgtcacgtgtaggttgagcaattatgtctgtaactattatttcatgatcatttcgttcaaagacgattgcctgatctaattccgcatttacttttttattgatagtggaattttgattaaatttcaaatcatcaagctcccgatcaataaatgctttttgcgagctggttagctgatgatatttatctgcagcagctttagtaaacgacagaatcattttacgattaaactcacctattttatccggatgctcacttctttgaccgcgcacatcatcatcaatatatctttttttcatcaaaaatcacttcctctatttttactatacaggagatcatttctattagatatttttctgcttggtttagttttttcataagaaaaacttaccccggatttaaaattgaagtgcaacactaagtgttaaacaaaaaggccatgaagacctaaacttgaagtgacgaaaaatcaagaaaggaagatctttatgaccaattcaaattctagcatttctaagcactatcatcaattaaccagcgtacaacgtggacaaattcaagcaatgctggattccggcataacttcccgtactgttatcgctcaagaagtcggctgccataagtcgacaatcagtcgcgaaatcaaacgcggaagtgtcctgcaaagagacagcagctatttattgtatgagcactattacgctgatactgcacagatttattatgagaagcgtcgcaaaaactgctatcagcgcaatccattgaagcattatgctgtctttttgagaatgctctccagacgctttaaagctaaatttgatgccaccagcatcgatgagttcgttggtgaattcaaaaggactatgccaggctacccttgtcccagcacaccaaccgtctatcgctatattgatcagggcttgctggacataagcaatattgatctgcctatgaagctcaaaagacgcaggaacaagcgtcatcacagccatggcggtcacgctttgcacaagaagcatcttggcaattccattgaacagcgtcctaaagagattgaagacagaaaagctccgctgcactgggaaggagatctggttaaaggcgtcagacgcaagaatcagcctgctttaatgactttgactgaaagaaccacacgctttgaagtagttatcaagattcctgactatcgggcaagcacatgccaaaggctgcttcaaaaggagattgacagacatcctgcctggtttaaatcaatcacgtttgacaatggctctgagtttgcggatatgaccaagatcaagggctgccagatttactttgctcacccatattctccatgggaaaggggcaccaatgagaactgcaatggtcttttgcgtcaattcttccctaagggcaagagcatgaaagacaagtcaaaagcttatgttcaacaggcaactgatgccattaaccacaaatatcgccgaatcctccaatatcacacagcagaggaactcttcaagcaatatatctcttcataacctaactgttgcacttaatttgacaattcaggtaagaaaaacttactatttatcatttatgtcctaaatacggtaaaatagataggacaattaaataaaaggagtgtagtaatctatggataacttttctaatactccaggacggcgtcaagtccaagatatttctgcggttaacagtttcttaactaagatgtacagtctaatgattttagctgttttagtttctgccgcaactgctttcttgacgacaactgtatttgcttcagcaattgctaacatgtcacaagccgtttactggatcattatttttgttccaattgttttatgtatgactatcagctttaaggcagctaagaatccgacactaggtttagtccttttgttaattctttcagcagtctatggctttgaatttgcctttattgcaggtgccttcaccactgcctcaattgcgggtgcctttttatctgcagctggggtatttgcagcaatggcaatttttggtactgtaactaagcgcgatttaagtaattggggttcatatcttggtgctgctttaattggtttcttagttgcatggctagtaaatgccttctttatcagaagcggtgctgccacctttatattctcttgcattggtgtattacttttcactggcttaacagcttatgatgcacataatgctaagaaaatttatatgacttacggtggtcaagtttcagacaccggtttagctgtaatgggtgcgttaaatatgtaccttgatttcatcaacattttcatgttcttgcttcaaatttttggcatgggcggaaatcgcgattaatctataattataaaaatagcgttgattggcttacactaatcaacgctatttttatttgatgatttcttatcctttttaagaaaactagtcagttcatctagcggcgtcttatgcaaaaatgccataatattttctctcatatcataaggtgaaagacgatcactgtagtttaataaaacccgaactaaatcaatcatactattaataaatacttgaacatcaataagcattgctattctttctttaccggtcaatttaatcccttggctatcatccatactattaattctctcaaaaaactcatcacaactcgtatcaaaaatcaaattataaaaacgaatatcaccattatctgaaagtagcaattgaatttcacgtttatgatcaaaacaataagaaatagtatttttggttgctgataatactgcttttaattgatcttgtgtaggaagagtcatatcaatattagctagagattcgcgatcacgtctaatactatctttatatccttcgataaaatcattttcaacgtctgccactaagctattaacgtctgcataatattgataaaaagttctggtacttacacctgatacttcaataatgtctttgacttttaactcataaacacttttttcttctaagcatgttagcagagcttctactaagcgattcttagtattagttactctaatatccaaatagcacccaatcctttcatctcattattcaaacataacatccggtgaaaataacattttactatcgtccaaatcttttttactttttcaacctaactgtaatttcattgttttaagcaagatgcattcataaaatgaaactgtcaaatcttttgtgtaaatagttctttctcgtaaattgattttttaattatttatttaatcaaagtaggattctaaggtgtcctgaacctgaccaaagcctttatgaattcgattgaaataacggtcattgtagctcattgcctgaatgccaataaaagcatcaagcgactgttcagttggaaactctgccttaggcttagctttgcgcttgatcacattgttaaatgattcaatcatgttagtcgaataaattgaagctctgatctgcttgggatagttataaaagaccagcagatctggttctatgtctttcaagcttctgataacatggctgtaaaccttgccccatttggtatagaagtcatgcaggacagctgtggcttcttctttgtttgtctgttgatgcacctgtttgaattcgttcatgatcttttcacgatcgtcgacgcgtactttagcgcagatattgcgcatgacatgaaccaaacagcgttgaaaatgagctttaggataagtcctggccaaggctgttttcatgccaacaacaccatcagaaagaaaaagctcaacttgctttaagcctcgggatttcatgttttgaagcatatctgtccagacttcaatgttctcgctaggtgcaatgcagtagtcaatgacctccttgtgcccattaggcttgatgccaatggcaatatagactgcttcacgctcaaatgtttctcggcgcaaaggaaggtatgtcgcatccaaatagacgcagaaaaacttgtcgcttagcttgcgtttgtggtaagcctcaacctttggaatcatctgcttggaaatatttgatacctgagctggactgtaatggctgccatacatcttttcaattagatcggctatttccctggtggtcacgagtaaagcttgataatcatgctttccaagatatccgagtgctgcttgtagtcaggcagcgtgtgctgatgaaattgaccgttgcgatcccgaggcacttgcacttcaattgggccaaattgcgtatcaactttgcggaaataagcaccatttctagagttgccagtattccagccatttctggcatagggatcatagcccagaaaggcagtcaattcagcttctaacaagttattaacagcctgttgtagctctttgcgcaataaatcatttattttgtctggattgaatagagcttgagcaaaatctttggtaaaatcattcatgaaggagttcttctttctgtatgtgtttttttgttcaaaccaatcatacgagaaaggaactcctttttctaatgtttaaagaaataaatttaaggaatcattcatccttacacaaactattttacagtctccataaaatagtaattgaaaaatgtaattagtaggtgatataagatgtttaatcaaaataaaatcattatttttaataatagaaaaaataattgctctaagaactatactttacctatgcatgatcaaaaactgctaaagcaatttcaatcaagtctcttagatgacataacatattatccttttcatcctcttagacatataaataagacttttgttagattcatcagtacttcaggcaagcctttattcaacgattttgtctatcatttgcaaactcgtgaattaattttgaatgacttaatcttaattagttataagtacctggtcaggaataaagctaatattgcttactctgatctaagaaagaattgggtaaatgtatttaacttatccttctgtaccaacgatattaagttcaacaaggaagctttattaaacaaaataaatgaagctaacaagatgtaattattcctttaacttccacatcttattaaccaaaaagaaaaagagttcaagtttagattcaatgtcattaagttaagacattgacaattaatattagacttttaaagcactgatttaacatttaattggttaaattggtgcttttttcgtacaacaaataaggcatagcacagattctgcttttttaagctacgcgatataaataatatacagctgatttgggcttaatatttctcttgtccttgcggcctggtctaattggaatggtataatagctgatctgaataaggatccgttcaaaatcttgcgttaaagaagaagccaaatacatgctctgaataatcaagcatgattgcttgaaattgatggcatattgatacttgcaatgcttttgcggaatataggcctgtgcatcaatttgactgattgcattaaacataatcatatgggcataaatttccatttcaataaatttatcttgtttggaatggaactgtacactgcctaaagaatacttcaatttcttgaaggaggtctcaataccccaacgcagatgataaagctctttaattctttttagcggataattttttcgatcaagattggttagcacaacttcccattcttctttgcctgatttggcatcattaattctaaatttgcaggctcgaaattttattgtgcataactcgccaaaatcccagcttagatcctgggtatttttagagcgatacttaatatattggcgataatgatgctggacatggtgaatattctcactggctttatgcgtgatgtagtaatagttagaagtagttaccaggcaggaaatctcacgatcacattcttgatcaggcaatgtcgttatttctttaactccgccttgtccagccttagttcgtattatgtaatgacagttaggcaggcgattgcagttttcaatcatattgaaactagtgtagccacgatccattgttacaatatatggaccacaattcaaagctttaagcatttgaacagccgctttgcgttcatccatttctgatttaggctgaaaaatacaatcctggtaggtattattcaatagatcatataaggcattaacgtgaatttgacaatagggtttctttttatgagaagaagcttgtacaatgttattcgatttcggattccagatttgattaaagtcagagccatcaatggcaaacaaacggtagtgatgatcaaaaagttgaatattaaatagattttgattaaaaacagtcagaatatgtttaaaacaagcaggagaaagctggcttttgcgttgaacataggcagaagtactaactactttatcgttctttttagttgcatcttcgccaaaagctctaaagagttcactgtttaaattctgaccttgcatgttaattgtagttttaaggactgtcgctgcatctaaagtgcgtttcctggtaaaagcatgaggattattaataaaatcgtgaatatgatccccagtattattgataatttgatcaagacgttctagaatattcttatgaagggctttcataattaacaccatctttctggcaataattttgaaggtttaaaatatataatatataagataggcgaaaaggctggtcttttcgcctttattttatacaaaaaaagagatcgaatccaaatgattcgatctctaaaaaagcacccttaattgtcaatgtcttaacttaatgacattggtttagattgcttgaactcttttcgtttcttttgcttcaatttattattgtcttttagttagcttagccaccaacataaaattcaatatgctgttgcaaattgttaaattcaactggacaataaccaccgatctcaccatcaagattaactggtaagtcttgcccttcacttttaccaatcaactcggccttcaggctacgcgttttggtataaatgatattgggatcatcaacatgtttaccattcaaagccaatgccatcaacttcatcatgctaacagggtcagaaggcttgaccacgatcaattggaataatccatcactaagctgtgcatcaggcataacttgctcaaaaccaccaattgaattagtcattcctagtaggaacattgataattttccttcataaacgccatcatcataagtcaaacgcatctcattctcagtcaagtgtggcaacatttctgcccccttgattaagtatgcggcataacccaaagctgacttaacctcagatggtacgccatatgttaactcagttaaagaaccgctggcagcaatattaacgaaatattgaattttgtcaccaaaaacagctttaccgatatccattttacgagttttattctttaagattactttagcagcatctggaatattatcacgtggaatggctaatgcacgagcataatcattagtagtcccagcaggaataattgccattttaggcctgttttctaaaaaggcaatcccgttaactacttcattgattgtaccgtccccaccagctgctacgattaaatcaaagccttccttagcagcacgagtagcttcattgcgagcactattttcttcaggtgtagttctaaaagcactagcttcgtagcctgcttgttctaatacatctaaaatatcggccacattctttggcatctgttcgtgacctgatacaggattataaattaatcttgcttttctagtcataattactacctaacgttctaaaaattaacgactttgcaattcttggttaagtaacttgttaaccatcttagggttagccttaccacgagtttgcttcatgatttgaccaactaagaagccgattgcacgatccttaccattcttaaagtcttcaacagattgagggttatcatcaacaaccttcttaaccattggagctaaaacagaagtatctgacaattgaaccataccattatcttcaacatacttcttaggatcagtaccattttcaatagtttcggcaaagaccttcttagcaatcttagatgaaatagtaccgtccttgattaacttgatcatttctgccaagtgttcaggagttaacttaatatccttcaattcaatacggtgatcattcaagtaaccattaacttgagtgttcatccagttagctgcaagagttggatctgcgccagctgcaacagcttcatcaaagaagtcagaactttccttagtttgaagcaaaacgttagcgtcatatggcttcaaaccatatttatttacatagtcatcgtaacgagcaaatggcccctttggtaattccttagcaatttcatcgatccattcttgtgaaatatgatctggtgcaatatctggttctgggaagtaacggtaatccgatgcgccttccttaacacgttccaaaacagtcttaccagttgcttcgtcaaaacgacgagttgaaagttgaatatgaccaccagctaatagaacttgttcttgacgcttttcttcgtaggcaagtgaacgacgtacgtgatcgaatgagttcaagttcttcatttcgaccttagtaccaagttccttttgacctgctggacggatggaaatgttagtatcaacacgcattgaaccttcttccatcttaacgtctgaagcaccagtaaactgaacaatcttacgtaacttttcaaggtaagcgtaagcttcttctggatcttccatatctggttcagaaacaacttcaagaagtggcacaccctgacggtttaagtcaacgtatgaataaccgttagttccgtgagtgttcttaccggcatcttcttcaatgtgcatttcgtgaataccgattctcttcttcttaccacgaacttcaacttcgatgtaaccatcacgagcaagtggttggaagaactgagtaatctggtaagccttagggttatcaggatagaagtagttcttacggtcgaagtgagtagttggcaaaatgtgagcgtgggttgcgatggcaaccataatacctaaacggtaaacgttcttgttaaccattggcaaggtaccaggcatagcccagtcaattacattagtctccgtgttttgttcagcaccatatgttactggtgaaggagagaaaatcttactctttgtctttaattcgaagtggacttcaagtccgatagtcgatttaaaattcattcaattagtcctccattccagttggtgttttttcataaaacttgttagtgcgttcgataaagtcagcagtcttgaagacattaccttcatcaaaacgcttagccataacttgtaaaccgacaggcatcccatcaactaaaccagctggaacactagctgcaggaatacctgctaagttggcagaaatagttaaaatatcattgttgtacatcttaattgggtctgaaacttcttcgccaataccaaatgctggctcagtagtagttggtccaacaattacatcattttctgcaaagatcttgtcaaagtcatcacagatcaaggttctaaccttagcagcttgtctaaagaaacggtcatatgaaccagctgaaagggcaaatgaaccaagcataattctacgcttaacttcagcaccaaagccttcagaacgtgatttaacgtaaacatcaagtaagttcttagtgtccttagcacggtagccgtaacgaataccatcgtatctttgcaagtttgaagaagcttcacttgaagcaatgatgtagtagtcaggaacaacgtatttagtatgtggcaatgaaacctcattgatcactgcaccagcatccttcaaagcatcgatttgcttttgaataacttcacgcatcttaccgtcaactgcttccatgtattccttaggaacagctacgcgaaggcccttaacatcttgaccgataaacttggtaaagtcaggtacttcacgggttgaaacagttgagtcatgctcatctgcaccagcaattacgtttaatacttcagctgaatccttaacgcgcttagtcattacaccaatttgatcaagtgaagaaccaaatgcgataagaccccaacgtgatacacgaccgtaagttggcttaataccaaaaataccgttaaatgcggctggttgacgaattgaaccaccagtatctgaaccaagtgctgctacaacttgaccactagcaactgcagctgctgaaccaccagatgaaccaccaggaactttatctaaattccatgggttgtgagtagcaccataatatgagtgttcagttgatgaacccatggcaaattcatccatgttggtcttacctacaaaggttacgccagcttttttaagcttagaaataactgttgcatcatacattggcatgtagttgtacaaaatgtgactagcagcagttgtcttaatcccgttagtgatgatgttatccttaattgcgattggaatacctgctaacttactcttggagtagtcaaggttatctgcaggcttagcatcatctaaaacagtgatccaagcatttaacttcttatctgtatccttaatgtttgccacagtgtctttagctaacttatctgctgacaagtcaccgctggcaagctttttgtttaatgaatcaatattttcgtttaagtaattcattactcgtcctcatccttattaataattacaggaaccttaatgtagccgtttgccttttcaggaacgttagccatcaatgtttctctgtcttgtccttgccagtgttcaggtttatcttctctgaagacagtatcacgatcaacaacttgaactgtttcatcaacaccctcagtatcaacttcactaagttgatcagccatattgataattgatcccatttgatcagtaaatttatctaattcttcttcattaaacgcaagtcgcgaaagagtcgcaacgtgtttaatggtatcttttgtgatttccacgcaaatacctcctattcgccgccataaacatggacttgataatcactatcgccggtttcttttgcaactaaagcttgtacatcatctactgaaccaattttgatttcaattgggatattgccagacaagtactttttagctgacgacaaaaccaaacgggtaaaactttgaatttgttcatagccataaaattgcgttgttacggaaatgttttcttgtgaaagcttaccgtttgtataacgcaaagttgccgttaccccactaatattagggaagtagttttgaatagccgtcttgaaatcattgaagtgcgatgcatcatcactgttaattgctttttcactaccagttgtcggtaaaacttgcattttttccgacatggatttccatttagatattttactactattagcggccgctgtcccgtaagcgaagtaagttccaccaactaatgaatcttttccagtcttggagaacaaaccaatcgtaatcggaatattctttaaagctttcttcttacgcaagcgagcaacaatttcattagctattttttcaccttgagctttttgctcagcacgtgaaatagtagtttgaaattctgcaccgttacgctttttctgataataatcaaccgaattcatggctaagcccaagctcataccacctaaattatacttggaaccagatccagtcaaataatcttgttcgataatttcttccaaataaattggattacgcgtatcggttccggtcttaccattatttactgggtttaaaccatcaggatttgatttggatttacgcattaaccaatcagttacagttgaggtatccaaatattgtccttcttggaagacgtattgattaggcgaaaattgattcttagaaatttgaatcagccctcgctctaattcacgcgtatcaacagaattatcattatcagtagctgttaatcctgcaatcggactaatattatagcgaccatttttcattaaaacggtatagccattcgttcccgtgttagtagtttgatagctttttttcttagtggttgaagtggttgtcgcattatttgctaaactagaatccttcaacttaccacaaccacttagagtaagcgcgattccagctaaagccattacttgcaaatattttttcacaataattgtcctttattcaatttgtgcaattgcttcttcttcagtcaaaagtggtacgcctaaagtctgcgctttagtatacttagaaccagcatctttgccataaatcacgtaatcggtcttatgcgaaactgaacccgtaactttggcacctaaagcttgtaattttttcgtaaactcacttctagtataatgctctaatttacctgttagcactacagtcttatccttaaatggattatcttcaatttctgcaggctcatctgcacctaggtaatccatattcaggccgctctcacgcagctcatcaattaccttctgtgcttctggttgagcaaaatatgttgtcattgattccgcgatcgtcatgcctattgtatcgatagaagctatttcttgcacgtctagagacataatctttgccagatttttaaacttttgagcaattaagcgtgctgctttggccccaacatggtcaattcccaatccagtaatcaataattcaactgagttttgctttgaattgtctaaggcagttaacaaattattgatcgatttttccttaaaatgatcgagttgtgctaaatcatctgcagttaagtgataaagatcagccacattatgcactaaatctttagcaatcaattgtttaacgatctttggccccaaaccggcaatgttcatagctggtcgagaagcaaagtgcgtaataccctcctcaacttgagctggacaagatggattgatgcagcgcaaagctacttcatcttctaggtgaactaatttttgcccacaggatggacaagtcgttggaatctgataagctacagaatctgccggtcttttagccatgacgacttcagagatttctggaataatatcgcctgctttatgcagtttaacggtatcaccaatcctgacgcccttttcattcaaataatctgggttgtgcaatgaagccctagctacagttgtaccagctagttgcaccggatccatgaccgcagttggagtaactactccggtacggccgacagtccaaacgatatcccgcactacagtttcttgttcttcaggtggaaatttataagcaatttcccagcgaggcaccttaacagtgttgccgagctcttgttcaattcctagatcatcaatttttaacacaatgccatcaataccatatgttaggctgtttcgtttagctgtgtattcatcgataaaggcaaaaacttcatctaatgtttttaacttacgaccggtttcattggtatgaaagcctaaatcatgcattttttgaattgcttggtgctgactagtaatttcttcaggcgtattaacccaagtataaataaaggtactaagttgacgcttcttggtaactttaggatcaagttgacgcaaagaacccgctgcagcattacgtggattagcaaaaactgctagaccttgctcttctctttctgcattcaacttggcaaaggcttccttgctcatgtaacattcaccgcgcacttcagttgttaacggttcaggcaaagtctgtggaatatcactaatatacttagcattagctgttacatcttcaccaacataaccgttaccccgcgttgaggcacgaaccaacttaccattttcatattcaagcgatagtgataagccatcgatctttaattccacgttatattcaactggatgaccaactaatttttgcatccgttgatcaaaatccttcagttcagctttggaaaagacgtcccccattgacagcattggaatcgggtgctctaccttggtaaaatcactatcaatctgtcccccaactctttgggtaatggagtcgggtgtcacaatctctggaaattctttttctaattcaagcaagcggttgtagctttggtcgtaaacattgtcttcaacctcaggcgcgtccttagagtaataggcctcagcccattcattaagctgttttctaagtgaagccgcttcttttttagcttcatcaagagtaatttctgccatttttccctcctgatccaaatcaatctttctttaattataccttcttaattggcgcaaaggcagccaaaagccgtttgattcctttaccagggaaagcaatatccagctccatatcttcaccagtgccattaactttagttacaacaccatgtccccaagctttatgctcgacttggtcgcctacattccagcccttcttttcagcaccgatagcgcctgaagctttcttagcagtataaacttcagcgcgagctcgttcggctttgcgagcaaatggtgccgtctgcttctcaaagctagattggataaagctgctttgtaatttttcattttcttctttgtgcagatcctgttcatcaatttcgtccaagaatcttgaaggcggattattttgcattctgccatacatcatccgtgagtaagcattagttaaaaacagttcttgcttagcccgagtaattcccacgtaagctaggcgccgctcttcttctaattcattgtcatccatcattgcacgttgcaacgggaaaagcccatcttccatgccaattaagaaaaccactgggaattctagtcccttagctgcatgtaaagtcattaaagctacttgattgtcatcttcatcaagatcatcttgatcgctaagtagagatacttcagccaagaagtcgcttaatggattagactcatcttcttcgggctcataatgatcatcaaaacgcttagtaactgacaagaattcatccaagttttctaaacgcgtttctgattcaattgtattttcagctcgcaaggcatcggtataatcaaaatcagttaagattttttcagttaaaccagttactgtaccattttgagcataagtaattgcatcacgtaatttagtaccaaaatcgcttaatttcttggctgctctagtattaattgaactttcagccacatgtcccatcgcatctaaaatgttgtagtgattttcatccgcaaatgttatcaacttatccacagtagcggcaccgattccccgctttggagtattaataattcggttcatactcatcgtatcagctggattagcaactaacttcaagtaagccatcacatctttaatttctttgcggtcatagaatttatgtccaccaacgatttgataaggaatattgcttttaacgaaagcttcttcgactgttctagactgagcattagtccgataaagaattgcgaaatctttataagcccgttttttatctttaacttcttcttggatctttgaaatgatgtagtgagcttcatcatcaccgctttgggcttgatagtaggttaccttttgcccatcaccttgatcagtccacaagttcttagccttccggttctgattatttttgatgaccgagttagctgcggacaaaatgtgaccagtagaccggtaattttgttctagcttcacagtcttaacatcatatttcttgtaatcctgctcaaaattcatgatgttttccatattagcaccgcgccagccatagattgactgatcggcatccccaactacacaaatattcttgtattgtgcagccaaagcatgacagagttcatattgagcctggttagtatcctgatactcgtcaactaaaagataacggaacttgttttgataatagtgcaaaacttcgctatcttttttaaacaaaactagggtctgcataatcaaatcatcaaagtccataatttgatcacggcgcaatctacgttgatattcttcatacaccttagccgccatcttctcaaatggtgacgatgcactctgcataaaagcttcaggatccagcaagtcattcttgccattagaaattgcggctaaaataccgcgtggatcatacatcttaggattgatattcaggtctttttcaatatgcttaaccaaagttaattgctcggccgaatcagcaattgaaaaattatgaccataaccaatcttatctgcatcccgacgcaagatccgcacacataaagcgtggaaagtcgacatccaaatgtcgttagctgctggccccagcaacttttgctcacgctcacgcatttcactagccgccttattggtgaaggtaatggctaaaatattccaaggtgcaacatgattttcttcaactaagtaggcaattcgtctcgttaaaacagaagtcttacctgaacccgcaccagcaacgactaataaaggtccttcagtggtttctaccgcttctttttgttgcggattcagaccagctaagatagatttttcgctcattattttccccttcactaaaaattatttcattaatgcaacttgaatattataccaaaaaagcagcgactaattcgctgctttagatttacttatcatatttttcaagatcaaactgttcaatcaaattaatcagcttatcggcatagtccggatcagtcgcatagccgtcggtaaccaaagctttagcttgtgtcttataatctttggatgctagaacatgcttatactgatcgtggttccacgttgtcccattctggaataatctagcgtgagcccgaatagaagcctcatatgagtcatatatttggaaacgcgccttcacggtaacccacttattctttacatattccttagttgtcatcactgccgaagtgttcgggttggatcctttaacaccaaaaagattattgtatttttgcgacaaatcactttgtccataattactttctaggcaggcttgagcaatcgtgatgcttggcaataagtcatacgacttgtccacttcgcgcgcaatcggaccaatttttttgataaagtcttttttctgttttaatagttttgctgcttcctgttctttttgcagctgtgcttgtcgaatctgctctgattgaatcgcgtaacgcctataatatctaaagccgacaaaagcaaccatcagaataaatagaattacgaatacacgcacaacggttttgacactttttggtactcttgatttacgttttcttgccatagttttattccctttaattactaattaaagtataaccgatttttgagtaaaaaaaagaagtcgctcactgcgactcctcaatcagtgcgggcgagaagactcgaacttccacgatctaaagcgatcacaagatccttagtcttgcgcgtctgccattccgccacgcccgcggcacatcaactataatagcctaaatacagttgagatgcaagaaaaaatataaattattttaaatttctgatcattttacgcaaaagtttgcgctaaacgcaggtgtcccctacatttaccacaacgatacttttgtgtattaatcctgcgcattcttggatatctcaacccacagttttcacaaagatataggtaacgatattttttctttttacgtaagccaatatcaggtgcataacgactgcctccaacttttttcagcaagattttaaaattgcaatcacggtgtcggtaacccaagcccaataaatgcaaatgatagtgggttaattcatgcttaatgattcctactagataatcatgatattgtggtactaaaaaatgcgcgttgatttcaagatggtgatcatccaaatgataacgcccacctgttgtggtcattcgccgattaatttttacacggtgcttaaaagggcgatcaaaatattttatcgaaatttcttcaactaaattttgtaattcattctcattcatggataaaattttattccaaaaataaaaatcagcaagaatttaatctcgctgattttttgctacctaaatatcttggcatacatccccgcctgcttaggcgtactaatgtgtcgtttcaagaaagttactaagtcatgtttgaatgactttttaccatccatccaggttccagtgaataagtgaatcgatttggagtccttagaaggattacacagaactccatctgaatagacatgaatgccatcttttaacacttgctcctgattacctagctttaagccatacttatttaccagcatttcagtaacggaaatactatttactcccgccatctgattcttagtgtcatattcaaaatcacgatcttgataataatccaaaatatcctgcataaatgggtggcctttttctgcaccaaaaattgcagctgacagataatcatggttttcaaaaccaataaaggcagaagcattcaaaagactatctaacttatccacgactctaacatcagtatctaaatatatcccaccttgttcataaatagcccgtgctcgaacatagtctgacacgaaggcccatttttttgcagcataagcttgttcaatataacggttctcatgcatatcaaaattatcttcattccactcaataatttgataatcaggcaattttttcttccaggttgcaatacattcttcaattatcggggatttaggattgtgtcctacccaaacataatgaatttttttaggaatcatttttaacctcgcttcaaaaagttcttaattagcttcacaatatcataattaaaatcaagcttgaacaagaacatcaatgtcagataaataattaacatgacaattgacttaaaagccatattgaaaaaggcagacggaattatattaggcataaacattccaatagccaaggttagcaccgcaattaacaaatacttgggcacgtcatggaaaacataactaaattcatagccatcacgtacaacccagagccgcaaaattaaaactactgcttcagtaattaatattgcaatcatagccccaactgcgccatatggcctatctaagagataactcaagacaatttctaaaattgccccaataactactggcacagcataatccttgtctcgctggttagccaaagcaaattggttagccaataccccgccagtcggaatcatgataattgttaaggtaaaccaaaacattaatggagtcatcggaacatatttattaccaaagaaaaacggtacaaactgcttggtatttgccataataattacggcgaacaaggtacccagcattacagtagcttccagtgattttttcatcactatcttttgtgccttttttccttcgctcgccatcttaggcataatgactagcgaaatactggtaattacacccagaatcatatttgaaattcgttgtgaattgtcataaaaagaaacctgagtcgaattagaaaaccaacccaaaattggtttatccagcgaagtataaatttgagtcgcaatctgtggaatcatcaaagtaccaattgcaattgccgtctgtttaaatttgtaaaaatgagcaacgggttttcctacatagcgccaaatatcaaaccaaaagacaaaggaacctagcattgtcgacactgacatgatcaataaatatttccacaagtcagcgggtgattttacccataataaaattagaaccacactaactaactttaccgccatgtttttcaaaacaacacgaccaaagtcagccagtccttgaaagaaccatgaaatatcaacctgtgctgagatcaagtatggcaccatcaacaagatataaaaccaatattgaacgtgaaatacagtcgctacaaaaaccgtgactaaaatggtgataataccggcgattccttggaaataccataacccccagaaagcattggttagctcctgcggtgtaccataagtgcgcgtccgtgaaattgttcgcatccctacatacgacacagacagaatacaaaaaatcatcaagaattgcactgtattgttcacactgctataaatcccataagtcttaggacctaagacacgcgataaatacggtacagtaatcagtggcaccaatacaataaaaatctgataaaccgcattatataagatgtttaaaaatgttttacgcattttaacctcgatattcctgcgtcatgtacttaaagacgttctcacaatatgaatcaccatgcacctggttagtcaaatgtagccagtaaagacggcgattagcaatctgctggttatcaagttgatccagattgcgaattagttcatcctctgaattaacacagattccgggagtaatctcagcatatggtcccattagtaatccgcgcgttttttcatattgctctaaaaagttagtcacaaacacaatcggtttgttcaagtgcaagtaatcaaagtagattgacgaaaagtctgtcatcaagaaatcagtatcaccgagcaattcgtacaaatcataattgtggtcaaacaagtaatcattgttcatgaaagcaatgttagaataactgctcttgaaattggcaaataagcgcatttcatagggatgcaattttacaatcagatattgatgccgcttctttaattctgtatttaatttttcaacatcaaaatcccgaaaggcaaaaaagtttctctctttgattttctccataatggatttatcttccaattcataacgaaaagttggcatatagatcccgatctgtgcctgatcgtcctcagttttaaataagtcagccaacaattgtttcttcgaaattaccggcttagccaataaatccaaacgcggaaagcccagcttgcggtatttttttgtctcaattgccatacaagcactcattagtgattcatatagatcagagctagaagcaacaatatccgcattcttgtgccacaatttttcgttacggcgattgtcgcgtcgcttagtattattagccataattcccatgcgcttgagtggaacgccatgccacaactggacattaatttgatgcttgcgcaccttaaatggttggtgcgttgtaattacatatcgcgctgctccgattttctgccaggttttccacttcaagtgtgacgatggccacggctcaactaatgtaacgttatattcaggatgattcaattgcagccacttgtaaaaagcatagccgttagatccagacctacctgaaccattcaggataaccacattattgttttccatcgtggtaaatctagccaaaaaactcatccaagccaaataaagacggaataaaaagcttttcattaaaatacttccttaaaatagtctaatacctaaagcatataaaaaaagcttgagcaaactcaagcttttttctttatttttgttaaactttattctttacccatttttctctggcagaatttaacaatttcaacaatcaaaaccatcaaaattccggcaattaagatgactaaccactgtggtccatcaagttcagtcacatcaaagaacttagtcataaatggcaattctaccgctgccataattacagcagcaatgataattgcaccattgaaccacttgttagaaaaagtatgcggtctaaaaatcgactgatgtacatacttggaattaattgcatggaacagctgaatcaagcccaaagtcaagaaggccattgtcaatgcatccccatgttgcaacgatggatcacccacatgtggaccgacatgcaaaccaatttggtatgcacctaaaactaaaattccttccaaaattccttggtaaataattgaactggcaacaccaccgctaaagaagttagacttcttaccacgcggcttgcgcttcataattccaacttccactggttcaacacctaaagcaatagctggcaaagtatccgttaccaagttgatccacaagagctgcacaggagctaagatatcccaacctagcattgtcatcatgaaaactgttaatacttcacccacgttacaactcattaaatatagaatggccttttggatattactgaagaccttgcgtccttgctttactgcttcaacgatcgtggcaaagttatcatcagccaaaaccatatcgctggctcctttagaaacttcggtcccagtaattcccatgccgattccgatatcagcttgcttcaaacttggagcatcgtttaccccatcaccagtcattgcaacaatcttgtcattagcctgccaagccttgacaattctaaccttgtgctctggtgaaacacgagcataaacgctgtagtcaccaacatgctgtttgaaatattcatcatctagtttatcaagttcagccccagttaaaacgcggctatcctgacctttttcaataatacctaggcgttccgcaattgcttgagcagttgtttggtgatcaccagtaatcattactgttctaataccagcactctttgcttcagccacggccgctttagcttcaccacgttctggatcaatcattccgactaacccagcaaaaattaaatcttgttcaacattatcagttgttagatcggtgtacaattggtcgactttcttataagcaagccctaagacacgtaaagcttgttgcgccatctgcttgttttgcgctaaaatattttgcttctgcttatctgtgatcggctctacttgaccaccattttcaatcctagttactcgctgtaacaacatatctggtgcgcctttgaccgctacaaagtattgctcgccatctttattaacagtactcatcaatttccgttctgaatcaaaaggcacttcttgaattcgtttgtatttttcaagcaagtcagttacatcaatgttttgatcaaaagcaaattgaatcagggcggtctctgttgggtcacccaataagtctccgccattttcaatcttagtatcattagccaaagtcattgccaataaagctgggttattttcgctaatactttcactattatcatgtaactttttatcatagaagaccttttcaactgtcatccggttctgggtcaacgtaccagtcttatcagaacaaataatgtctgtagcgcccaatgtctcaacagcaggcaatttacggacaatcgccttatgtttggccatcgtttgcgtacctagtgccaaaataatcgttacaattgctggcaagccttccggaattgcagctacagccaaggaaacggcaaccaagaacatgttaatcattaaagtagagttacgctctgctggatcagccttgagcactcctacgataaagacaataacgcagattgccaaaatcatgatggttagggtctttcccagttgattcaagtttcgctttaacggtgtatcagtttcatcagcattgttcaacattgtagcgattttaccaacttcggtgtgcattcccgtactagttacgattccttcaccacgaccataggtcacattagtattggaataagccatatttacgcggtcagctaaagcaatgtcttcaccttctaaagtttctgcatgcttttcaactggaactgattcaccggttaacgctgattcctcaatcttcaagctgtgggcttgattcaagcgtaagtcagcaggaaccacatccccagcttctagtaaaactacatctccaggaaccaattctgtgcttggaatagtaacgattgtatcatcacggcgcacatgcgcatccggcgtagccatttccttcaaagcatcaatcgcagcttcggaacgtgcttcttgaaagacgcctaaaattgcgttcaaaatgaccacaatcataataattgcggcatcagtccactcatgagctaataccccagacaaaatcgcggcaatgatcaaaacaataatcataaagtctttgaattgatcaataaaacgcatgaacatgctttgctttttcttggaagctaaggcattcggaccatattgctctaatctagctttggcatcactagcacttaacccatccttaacggacgtgttaagatctttttcaatgtcggggatcgactcgacataatattttttcgccattttccctctgctatataaaacatagaaacatgcagaagtttgatattttccacataccagaaaaaaatatatttttcctttcctaattttatttactgtcgtcatcattggtattccgatattccatctggggagtaatcgcattgaccaactcctgcagcttaagggtttagccagccccattatcttttattttgttaatgccaataaatttaatactgcattgtcatcacgatcattgctatagccacactcataacaaacatattcattgtgcttggtgccatgttttctattgccctgcaaagtgattttgtccgcaccatttttgacatagccgcaactagcacatctttgcgttgacgggtagcttctatcagccaaaattagctctttatcataccaagcacatttataggataatatctgtctaaatttgccaaacaaggacctctgtatgcctttggaagccacatgcgtcatcatcatttgcttgacattcaagtcttcaatgacgatttggtcataattatttgccagctcagtagtaaatttttgcaaaagatcattctgaatattgaaagccctgcgataatcacgctgaagcttggttctcacttgcacgtaattattgcttcggccagccaattttccattaactctttttttcttggccaatattctctgataatgcttgatccgcttgtacagtttctgcagtcttgccggcaaaatattgattctgccctcagtatagctgaagtgcccaacgttgacatcgatggcggtctttttgccagttttaacctttattccagctttttcttcgtaggaaagagcagcgtaataatggcctctttctctaaagatgctggcaattttaacctgtttcatcctcaatgcttcatatgttggaatatcaaaccatgatttaatttctctgggcttatccagtctgagcttgccattaataactttaactcggtcagtcttaaaaccttgacgtggagctttctttgacttgaaatgcggcttgccccagtcgagctgggctttgtcaaaaaagctcttccaagcgttggccaagtccttgactgccaactgcagacaacgagcagacaaggcaaactgccaatcagccttgttattgactaattcatctcgcacccgacactcattaggactaggattattatccttatttaaagtccgtgcttcatacatatcttgccaggtttctaaggctagattccagcagtatctgcggtaatcgcatagacggtcaagttctctttgcatggtcttgtttggttttagctcagctacctgtgttttaatcatttatttcacctccaatgcaaacataaatttagcaaaggatgaaacaaaaacaagcgaacaaaatattaaatttttagcagcagctaatttgtttctatgttttatcttcctgatcaaattaactgcatctttttctatttattgctatcaaatcctatcttttagtcaatcattatttcctcctcaaaaataaaaaagagacttacatgcttgtagcacataagtctcacgaattaagataaatccagaagtatcttacttcggctgttggattcatcgcaagcaattgctgttactcccttatgacaagttaattataagcaaaattttagctatctacaagttttagcgaattgcttttactttttataaaagtcatcaaagacagtaactggcaaatgacgcttgtgtttactcttattccataatttttcaatttgatcagctgttttatctgatacttccttaccttcaaggtaatcatcaatctcttggtaagttacaccgagggcaacttcatctggcaaatctggcttttcttcttcaaggtctgcggttggagccttttcatataaatgcttaggacaacctaattccttaagcaaagccttgccttgacgcttgtccaaacggaacaatggcgtcaaatcagcggcaccatcaccaaacttagtgtaaaagccactaaagttttctgcagcatggtcggtaccaacaacggcacccttattagcaccagcgatggcatattgaactaccattctttgccgcgccttaatattgcctttgttaaagtcagtaatcttttgaccagttgcttctacaaccttcaccatagcatcaactggttccttaatattaacaattaaatcctgatctggcttttgaaaagcgactgcatctgcagcatcttgggcatctgcttgaacgccataaggcaaacgaacagcgataaattgataagaatcatcgccagtttcctcacgcatttcttcaattgccatttgacacaatttaccagtcaaagtggaatcttgaccaccagaaatacctaagacgtatgacttaagaaatggattagcctttaaataatctttcaaaaaatcaattgaacgtctaatttcttttttagggtcaatttctggtaaaacatgttcataagcgataatttctttttgtaattctctcatcgaccaatgcttctttctctaattttacgccgaatgtcttgaatcaaatccatcttggattcgtataagttttgtgataaatccactggatattcctgcggattcaggctacgcttatattcatcccataaaccatcaaggttgtcagcacagaattttttaatttcatcaagactaggttgatcataaactaattttccatctttaaaaatatcatgtaaaagtggaatagcagtgtaatcagttaccaccttattaatatagttatattgtgggtggaacatgaagagcgcgtcaaatttgcgtggatcttcattataccgagatacccagtcaccttcatttttcttagcagtgtttgcgctaatccgccatacttgttttttacctggggtggaaactttgatggcatttgaagaaatcttcaatgtatcccgcatggcgcctaattcatcttccatggcaaccaacttgtaaacagcaccaagggctggttgatcataagcagtgatatacttggtcccaatgccccagacatcaattttagcgccttgcatctttaagttagtaatggtgttttcatcaaggtcatttgaagcaaaaatcttggcatctggatagccagcatcgtctaactccttacgaacttgcttagaaatgtaagccatgtccccagagtcaattcgtacgcccaagaagttaatcttgtcgcccatttcattagccaccttgatagcattaggcacaccactacggacagtatcgtaagtgtcaaccaaaaaaacacaattcttatgtgtttccgcatatgccttaaatgcgtcatattcactgccaaatgcttcaactaaagcatgagcatgagtccctgaaataggaataccaaacaatttaccagcacgaacattactagttgaatcaaagccgccaatataagcagctcgagcaccccaaatggccgcatcggtttcttgcgcacgacgagagccaaactccattagaccatcatctttaacagctaacttgattctagcagctttagttgccaataaagtttggaagttaataatatttaaaatagcagtttcaactaactgacactgggcaagtggaccttcaacttgcaaaattggctcgttagcaaaaaccagctcgccttccttcattgaacgaatagtgagctttaattttagattgcgtaaataatcaataaagtcatcatcgtaaccttcattttctttcaaatattgcaggtcactttcggtaaactttaaattctttaaatagttaatgatgtgttccaaaccagcataaacagcataaccgttgccgaatggttccctgcggtaaaaactttcaaaaacggcattgcgatcagcaatccctttcttgaaataggtatacatcatattaatttcgtataaatcagtgtgtaaagccaacgaatcgtctttggctaattctggataaaacattgcttctctttctgtcattaaaaattaacaatttcgtttttcattatacagccattacagtccattggctattctcaaaactatttttacctcaaagttaaatacactttttcaattgagtccagttgatttttaatagaaaaatgctcttccgcataccgcttttctgtattagccatctggcgtaactcttcatgggttttattaacggccagattaatctctttagcaattgaatcaatgtctcccgttttagcaatgaaaccatattcgggtcctggaatcattttatgaatatcacctacatctgtggacaaaatagggattaaattgtctgttgcctctaaaagcacaagtggaaaactctctgaatatgaagttaggacggctagatcaattcgcttatataatccgctcaattggtgttgagtcataaaaccgtgaaaagttacttgtggtgccatgtccaattgccgcgtcaaggccttcaatgcttcaagctgactaccatcacccgcgatatgcagacgaatatgctgatcatctaattttttcacagcttttaagagcaattcttgtcctttaaccttttccgtacgagcaacgttaataatattaaaataggtatgttcatatttagctggaatttcactatcactgtggaaaaagatgccattatagatgacatgtaccttgtttttatccacatgtgcgcgattaattagtagcctggcaaaacgctgagttactacgaaaatacaatcagcttttctcaacgcacgtaaattaagtttagtaaaaatattgccaatgattcccctaccttcaaagtctagataaggatctgaatgtacagtaatacaccaagctgcacgaattcgcttgtgaatcaaagataaaaataagttggcacgcgcaccatgagtatgcacaatatcatagtgcccctcattgataaacttagtcagtctacctaaactgcctaagtcataacgactattagctcctagcacatgtgtagtaatcccagccgctcttgctgcttgtgctactggtccttctgccagcgttaataattcaaaatctttgccttcatttttggcttcagttaacaaattaacaatatgtgataaaccgccgccattttctaaaccagcatttacatgcaaaaccttcatcttagtaaaattattttcccttcttttttgactgtttaactcgcacaacaaactgtggcaaaactaacatccgcttaaatctgctaggattagtaatcaagcgataaaaccactctaaatgcgtcttttgaaaagcttctggtgatcttttaacgatacctgaaaagacatcaaaactgccacccacacccatcatcaaagctggtgtttcgttcttacgtaagattgatagtagtttttcttgcttagggaaacctaatgctgcaaaaaccatatcgggttgtgccttctgaatgcgccgtgccactagttccaaatcttcagtaaagtagccgtcttctgcaccaactagattaatatttgagtattccttagcaattttgctttgtactgcatgaattacttgtggcttagctccaattaagtaaactcggctaccacgatcgttagcaacatccatcagccaagtaaacaaatcatatccagtcacccgctcaggtaacggctgcttaagcattttagctgcttttacaatgccaatcccgtcagcagtaatataatcgggatcattttttagaattttcataaattcaggattctcgtttgccgccatcacaatctccggattagcggtcacaataaaggtcgacaggtgattatttagtcgattaataaattcattttggaattggttaaaagttttattatcaaaatcaacacctaaaatattaactttgctcattttcacacctcatgcgttttcttatctagtttctattctaccattccgacacgcaagtacgagaaacatgttgtaagtgtcaatgtttttgcggtagcctttaaaccattagtctaaccttaatttcttaaatatttatatgacttaaatttctgcttagcttgcttaaataactattgccagctacctgtgcggttaatgcgccatgctggatgcctaaatgaacttcatgacgcttctttaagctgtcacgggccgctgcttttaattcctgttcagtcaatacagttatttctgaatcttcaaactcgctgctaagccaaaattccagctctcgattcttgatgcagcttaagatcctaagcatgccttctgctccagattttgaccatttcttgccttgccccttaacacggtaggtatacttgcggtggttgctctcgcagcagccaatggctttagtcacagtcagttttcgtttcttaaacggcttaatatcgtcccaatgacgatcaatataattccttaggcgccccagataatcatgattgagctcggtattcaattcatcaattagtcggctttctgcagtggttaggatagttttaactttgtcatagctgtatttgtattccaaagcagaaatcagcttgccttgcaggtcaggcgcaaaatatagcctttctttgattttcttatttaggtgaaagacatccaagaaatgctcatgacgcttgcatagccctacaatgtcatcgaagtctgttttggcatatccagcaccgccatcggcgttgctaagaattacagtatcagaaagatcataagtattggccaggtactccttggcttcgttcagcgcatcaagtcggcttaaagaaacaaattccttggcattgattcgctttctgcgtttcttgcttatattgacaatgccttcacagacctgatagcgatgaaattccaaccggcttttagtgcctttgatcaccacgccatcgccttcaagatacaaaactgggacctttttcttagtgcctgcggcatcatatcttgaatctgcttcttggcccgctttaatatttttcccggccatttttaccaaattgcccacctgcatatggctaatattaaagccagacaggcaattgactgctagagcagtattgcgataagtggcaacgctgcttacttctaagatgtttttgactgctaaaatactgtagcgcttgtatttgtcaaagcccattaattcatccaagggataccttgcttgtttgcctgggcagacatatcttcttctgacatacctaacttcgccaaaagccatattgattgagcgctcattcttcttatcaatctgatagccctgtgctttaaccttggtaatcatttcatcatcaactttagctaaagccaagaccatgatttccttaatcaggtttaagaagaaacagattatttttctttcacgcttaatataattatcttcagactttataatatttgcgatttcagttacaattgaattcataaaagaccagcttctaatgtgttttttgttcttaacatcagactactggtctttttgtttgagctcaagtccaaattcaaaggacttgggcttttttaattatttattcaacttaccgtaaaaaattatacacttagaaacatgttcaagttttatattttattcaaacatgataagattgttttaataaaggagaaaaaatgaaaagagttattacctatggcacctttgacctacttcactacggtcacgtgcgactgcttaaaagagctaaagaattgggcgactatttaatagtaggtttatctaccgatgaatttaacgaattcaaaaaacacaaggaagcctacaatacctaccctgaacgtaaatacattttggaagctatccgttatgtcgaccaagtcatccccgaaaaggattgggatcaaaaaatcaccgatgtacaaaaataccatatcgacacttttgtcatgggcgatgattggaaaggaaaattcgacttccttaagccttattgtgatgtggtttacctgccaagaacgccaggaatttccactactaaaattaaagaagatcttaaataaaaaaatactccaattccattcaatttgaatgagattggagtttttgtttacttagaaaaagtgaattcaaatcgttctgcaacgtaacgtgcgcgggtgtattcgaatggttgcccatctgctagttcagttacctgtcgtctagtaattaacggttcaccttttttagctttaagaagacgcgcatcttgctcgttggcaattgatgcagaaatatgttccgtcactcgtccaatggcaaaaccaccgcgcttttctaaggttttatataagtgcgttgaaacatcttctttagaaaaattctttactaagtagtatggcaccgttacgacttcataacaaattggtgtcttatcagcgtagcgaatccgctccatccgcaaaacgttctcattatcttttagcgcaagacgctctttttcagataaagatggattgccaatctgataagaaattaacttacttgaaggaacttgaccattagccttagtaatctcagtaaaggacataattcctgacattttttcttgaaccttttgactagctacataggttccgctacccaagcgccgttctaaaattccttcatcttctaatgttttaatcgcttggcgtaaagtcattctcgaaacgccaaacttaactgccaattgacgttctgctggaatacgatcccctacttgataaacgtgattctcaatatcacgcttaatctgattgtgaatcttgatatacatcggttcttccatagtcgccacccccaaagtttagtactgctattattataatctaaattggtctagcttgcattaataacactgcttcaattttacagactattttttcttagcggtccacttcactccaagaatataaacatttggacgcttgttatattccacttcaacttgttcattatcattagcaactacactggcactaaattttgcttcatctttaacagctaagttagcctgattaggattcagcacaatattgtggcccttcatattagcttcaccgctcaaagctaaaaagtactcatagttcatatttccagtgaaggtaacacgtgtagcatcacatttcgcctgatcttgaaaatctgcatgagctaaaattacggcattgttcattgtaacttttgcttcatcaactactatcattcgattgatggttgaattttgaatgattgtccgtgtctttttatcaatataaaccccacccaaaaaagtagaattcataatattgctccagcagtcatcacttaaataaaggcaggaatcgctagcagacttaacttttgaattaagcatattcatccaagtttgcccatgcagtaatacataatctacttccgaattattaagatccaactccgcattcgttttggcaaaagtattaatactgccgtgaatctttgaattatttacaattgctgttccttcgccttcaattgccaaagcacaatatttgtccgagaaataatcaatttctgaatcattcatttccaaacggaaattggcatggtcatacatggaaactgaaccgttaacaattttggttgaataaagttccaacgtgatcttaccattaaccgcgatagctgctgtatcagttcccgtgcccttaataaagcaattacgcaaagttaaatagccatcaacgcctactggtacagctaggctattatgttcggtagttgtatcaatgcataaattttctaaagttacataacgactatcttctgaaacactaatatagccataaatagtcgtgtcttctggcaaagagcctgttcccttaattgtgatatctgttagtgtaatgccctgcggcaaataataatatccggggcccagcatcaacacatcatcggcacgcaaatcctttaaagcctcgtgccaactgactgaactgctagatccccctactctaattatcctagccatccattatcctttcatctcgtaaaaaccgattactattgtactaattttcttcaatttatgttgtatttttgctcatcaaaaaagctaggttcgattcctagcttcttatactatttcattttaacattccagtaataagccacattaccataaggagaaagttgaaaacctttcactctcttattcaataagtatgacgtaccttgttggaatagtggtgccgcaaaggcatccttttgaattaattgtttttcagcgttaactaaggcattcaatctcttctgcggatcagtggcataagttgaacgagccaagtcaatttgcttccagaagttagcattgtgataatctggcgctaaattaaacaaaccaccaactgtcaagaaatcaattggatcttcataacttggctgccaagttccgtaaacaaagtcgtaattgtgattagttgtgttagatagccgtgacttcaaaggaattgaccgtacccgtagagttagaccaggtaaatttttcatcaaattgctttgaataaattcacccacacgcttagcatcgtcaatatctgaagtaagcaattctaaggttagcttcttcttacccaattgcttcaaaccaagttgccattcctttttagcttccttggcattataggtaaccaagtcgccagcatccttgcggtaatcgttgccagttgcctgatcggtaataaagtttgcggcaacaattccatttgacaccttgccttgatgcaaaacggtcttgactaactgttgcttattaattgcccggctaatggcccgacgaatatgaacattgcctgtactcttacgcttcaagttgaaagaaagataaccattagttggcgtaactttggtatgatagctagaattattttgatactgcttaacaaaatcagaagtcaatgtcgtgtaatcaagttcaccacttctgaataagttaaccccagttgaaggagtttgaaccacttgtacgttaactttattcaaatcaacaattttcttgttccagtaagttggatttttcttgtaagtccacttcaaatttgaacctgtccaaccagatacggtaaatggaccattgtaaactagattcttactgctagtcccatacttagagcctaactttttaaccaatttagaattctgaggatagaattgtgcaccctctaagatttgtggcaaatatggaattggattagctaatgtaacttgcaccttatacttgccgagtgctttgattcccaatgaatttaccggtgctttaccttgagaaattgcctcaccgtttttgataatggcataagaatcggcatctaaagatgaattttttgggtcaacggttctgcgccaagccgttacataatccagggcagtaactggatcaccgttagaccacttagcattattgcgtaaggtaaaagtatagaccttctggtctttagaacgttcaacttttgtcgcaccagctaattctggctgatttttcttattaaaacggtaaagaccttccatggaattctgcaaaacttctgaactagtcgtatctccatacttgctcgaatctaaagttgaaatttcatttgtgacagaggtattcattgtcttagtcggtgcagcattactgtcattgttagagcaagctgccagcaccaatgcggcagctgctgtcatcactcctgaaaaaatccattttttacgtctcaatcttctcacctttacttactttttgtttaatacttacattttacaagtatatctaatacggaagaaatttcaaatactttttccgtataatagctataatcaatacgtatacaaaaatggcaaaaaaagaaacgtcacataggacgtttcttttttcgggttgggtgttcttttagaactattgggttagctggattcgaaccagcgcatgatggtaccaaaaaccattgccttaccacttggctataacccaataccagctgaactttttacttgtcgttcaacaatggaggagggtggattcgaaccgccgaactcagagagagcggttttacagaccgccgcgtttagccacttcgctactcctccgttagctgacttaattataataacgaaaatccaaatcaaatgcaagacttttttgaaacttttttcaaaaaaaagaagaagccatgacgacctcttctcaaaatttaaaaattgatttatatctaaacagttaattttaagcctaatgccttttgtgctacttgatttaccagactccattgcttgtcataagttggtgaaaagaagaaatctgcttctgctaaatcttccagtgtcaacttatttctaatagctaagctcaaaacattggcttggccactaatgtcatatgatgaaagtacgctaccgcctaagatttggtggctgtcttcattataaacaacagcaatatagcaagtaggattatctttttcaggaatatagtctggacgaagataactctttaagactgtttcttttgcattaattcctgctcgcttggcattcttttcactgagtcctgttgttactgcatgtaaatcaaaggcttcaagcaattgtgcaccaactaagcccttaaagacacgttctggcttgtcttcaaataagtgctcaacaacatattgagcctcatgccgtgcagcaatggcagatggcatcggtactcttctgttagctggaatgctaaatgggaagattgcatccccaattgcatagacatcctttacattggttctaaagtaattgtctaccttaatgtagccattgtcataaagatcgatcgtgtttttcaaccaatcagtatttggcttaataccaactgtaataatgacacaatcagcagtaatatcacccttatcagtctgaactgcattgacctttccattgccaacaaagccagtaactttagtgttcatagccaggttaacaccatgatcagtcaattctttttcaaataagctagtataagtatcattcaaataattttctagtggtttttgcccaccgtcaattaaagtaacattcttgcctgctttagcgaaaacctcggcagctgcaattccgttaccagcaccaataactgcaacatttttaatagcttcatcttgagcagctgcattgatctctgtagcgcaatcatagcctctcatcaacataatatttttcaggtctgctccaggaagaggcaaacttgcggggttaacacctgaagaaataattagcttatcataactaacttctttggttgtaccatcttttacgtttttgacagtaaccgtctttttagctggatcaagagctgttactgctgtgttattaacaactttaccaccccgttcagctagatcttcaggagtaaagtttctaacgttgtcttggcctgtagtttttccttcaaggaatagcttcattccgcaagacataaaggaaacgaagtcgcctgcttcataaatcgtaacgtctacatcatcataacgatctaaaatttcataagctgcctcttggccgccgtgggatgcacctacaataatgattttcttttttgacatagcctgacctcctaataatgcagcaataattgtcgtttttaagtaatagcagttattgtaactggttacattatttatcttttaataagatatttcaattaatttgcttttgattagtgcgaagcagcaatatattttttatataaaaaagagcactactgatagtagtactctagagggaaattttccaaaattatcttatttagctaattctgctgatagatttcgttcactaatttagtgatttcattacgattaagaacttcatcatacatatccattgtttcctggattgtattttctaaattagtaccatgatttttggcatagccaataaacttttttgcatctactattttagcttctttaatcgctttttctgcagctcttttagcaacttcattcatctcatattctagcttattcatgtcttcgacccattttccgctattcacgtagtagtcgatatccttctgcaggctgatatccctgcgtagtacatcatccgtttttctagatcatttttacgtgttgtttgcatctcaatatcatacactcgactttgatcatcttgtgcccagatatctaagcgaatgttttgggattctagtccaatgttgccgtcatactgggtaatgacattaacttttgtcaattttaattcaggaaacatccgacgtagcagttccagacaattctttttattgctcataacatgaccgaataccaagtcgttagtaattcgaggatatcgattaattcttctcctcatattttacctcttttctttttcttaagtaggaaaattaccctccactatttattacgcaaaaaagtgcaaatttttttcagaaatttaaaaatttagacacgaaaaaagccgatgcaaatgcatcgactctttcagttaaattattctactttttaatagaagtttacagccttgatgtaacgcttgttgttgtttctgcagccttcaattctgtagtacttcttaccgttcttaaatctcatttgaccaccgtaagtagttacagtttgacctctgtacatcttaccagtacctggagtacgacggtatgatgaccaataaatgtaggcattgtgcttaaaagtacgttggttaccagtaatgttggttacacgaacgtattcgtccttgttagccaccttgtagtaagtcttaccgttgatagttacaacagttggaacgatttcaatgtcgttgtaagcgtagtacatgtgacctaagtagttaccgttcttgtcataagctcttgaatcaaccattactggcaaagtcttggtgttagtgtcaccagctggcttaacaagtgatgaagtcttaacccaaatgttgcttgagttagcatctgacttagacttagttgaaacttgtgagtatgatacattgttaagggttctagtttgatcagcaacgtaaacagtgtcaccatctttgaaagtagttgaagctggtcttacattaatgccataaatgtggtaagttgcgattgagcttgcgccattagcatatagagcttgtttgtggcttgaagtaattaaaacagtgtatgttgcagtagtcttcttaccagttaaaccagtagcagttaaagttacattatagtaacgtcctgcttctgaagtattaacaggatttgaagttgcttctagtgaagcagctgtattattattgctgttttgtacagctgaaataataactggctcaccattactatttacaaaattagttggattaaattgtgaaccaacagctacttggaatatttgaccattaacactccccttgctttgaccattcaatgaccaattgatcactggattttgagtagtatctgtagttgaacttgaacctgaaactacaactgggatttgaacagtagctgtttgcgtagaagtagaacctgtaccagttaaagtaagattgaaatcactagttggtaccgcagtaatattcttgttatctttatcaagagttacacctgcattcttaagaatagcagcaacttcactatctttaaggttaactttttctccactggcattattcgtactaaagaaaactaatcctaaatcattaattgccttagtaacactagctacagtatctttagccttaatagaaatagtagttggtacaacattagctgttttatcggtagtacttgcagcatcaattacttgattgccatatgtaaagtatgatctatctgttggctttgctgttgttgctgtagtagtacttgtagtaccagtagtgttagttactgtacctaaactaatagcagcgttaactggaacagctgaagctgctacaggagcaactgccaacaaagcggcagcagccatacttacaattcttgtattctttctcataattatgtggcctttcctttctgaaacagaaattcatcctaagcagtaagttatatcttcttctgcttgtgaaataattatagcatgttacgaacccgattactaaaaacaggatcgactcgtgtgtgtgattttaagaatacctcctaaaatcaccagtaataccctaccctttatttgttaaactgtagttaccggacttttacaattaagattcaaaacattacatttttgtgaagttttaaacaagttattgatttatgacagaacttatgtgtgttaagaaaaggtaattttaacacttgttcgcttaaaaaaattaaagctcttagattttttgattagaaataattgcttcatgttctttaatatgctcaactcgccctgcatcccccgcaataagtaacaaatataatgcctcaatcattgtcatacttgccacgcgtgagaaataatactgcgattgcatcaccgtctgccgcactgctgtctttaaatgcacatcagctaatagcgcaatcggtgaatcatcgcgattggtgatcgcaatcaccggcatccctttttgtttggctaccttaatttgcttaatgattcccgctgcttcacctgaattcgaaatcaccaacaagcaatcctttttactcaggttcattgtctgcgcaattgccgtttcaatcgtgccacctgaatcaattgccaacaagccaatctgattaaacttatacactgcatcagcggccaccggataagtatcgccctccgcactaacctgcacaattctgctttcagtcaaaaaatgcagcacctgatctaatttggcttcagtcacattctccaaagtcgccttaatctcggcgactttatttttttcaatcaattccaaattagcactagcatcatcacgtgacatattttgaagtgacacactttcagttgcattctgagctagttgaatttttaaatcatgaaaacctgtcaaatctaaattatgacaaaaacgcgtcaccgaagcatcactcacctcagcttcagttgctaattttgaaattgtataatttaccacctgttcgggctgttttaagatcacttgagcaatcttctgatcactggctgacattgtcgctaatttactatagattgtatcgataattttagtcattattctcaccttttctgtgccaaaattatatcatcaatgtaattaattttcacaattttatttttaaagaaaataaatttatattttgattgacgaaaatcatttaccaaggtagtatgtatttgtaaataattttcacaggagaaaataaaatgaaaattaattcgataagtgacctcgctttaagtaaaatcaagccgaaaatgactatttctcttggcggcggaagcaatgtatttaagttatctcaagcgattgcacagcataacttagacatcacattatattctccatccgaacttactcgctttaggtgcaaagaactcggattagagcttcttccatctactgcagcgactaagatcgatattgcttttgatggttgtgacagcattgataagaattttaacgttctaaaaagtttgggtggaattcatctttttgaaaaacaggcagcacaaattgccaaacagtttatcctactcttacccagtcaaaggatacaaccgattctgaatcctaaaattccactttgtcttgaagtggcaccgccttgtgttaatcaagtacagaagtatttaagcagtttacatttaactagtaagattcgacaagatagttcagtagctgcatttgcccgtacgcctttgggcaactacttaatcgatgtttttaacgaagattggcacaatatcactgaacttaatcgtcaactttgtttacaaaatggcgtagttagttcttcactatttgaaaacttaactacttcattaattactgaaaaagacggagaaattattgaacttaagagaggtaataatcatgaaaacatttaattggggaattattggtactggctggattgcacatgatatggctgatgctttgaacaaagtcaacggcgaaatttatgttgccgcaaatccaaatgaagaagcactccgtgcctttgtccaagaaaaacatgtacagcatgctttcactaatcctgatgaaatgattaaggatcctagcattgatatcatctatattgctaccccacacactttccactacgactacatcaaaaaggccctcaatgctggcaagcacgtcttttgcgaaaaggcaattaccgtcaatgcacagcaatttgatgaagtggctcaattagctaaagagaaacacctaatcttaatggaaggttttactctttatcacatgccaatctaccaaaagatgcaagatatgattaagaccggaaaatttggcgaaattaaaatgatccaaattaattttggctcactcaaggactatgatccgcagaatcgcttctttaataaggagctcgctggtggtgcattgctggatatcggcggctacgcaactgcttttgccattagtttcatggatgaatatcctgaaagtatcaataccacggtaaaattctttgaaactggtgttgacgaagaaagcggcattattttaaaaaattcgaaaggccaaatggcagtgatgtcattatcgatgcgggccaagcagcctaagcgcggactggtttcgggcaccaaaggttatttcgaaatcaatcaatatcctcgcggcactgaagctgatattacttacacccagagtgctcatgaggaaagctatgataaggttactgcaggggatgctgatcaggcgcttgaatatgaagtcactgattttcaaaagtatattgaacaaggccatgacgaaggcgaattggaaaaatcgcggatgatcgctcacattttaaccagcattagaactgcctggggcatgacttatccatttgataacgaggaataattagttggatttcaaaagggatcgatacataacatcggtcccttttatttgcacttattgcttattttctgcgacatatttttctagtcgtttcaagccttctttgatctgatccatcgacgttgcgtaagacaaacgaatatatcctgctccacctttagcaaaaaatgagcccgcaattacagcaacatgcctcttttcagccaaatcataaataaacttggtatcatcttgttccaagcctgctggaattttggcaaaaatgtagaaggcacctttaggcttaacgcattcaaagcctaacttggttaatccttcataaagcacatcacgccgcttttggaattctttcttcattggttccgcatcgttcattccattgcctagtgcttcttcagctgcatcctgcattggcgttggttccgtcgttgtgattgcttggtgaatcttagccagttgatccaaaatcggcttaggcgcagctaccacaccgattctatagccagtcattgcccaagcttttgacacgccattcattaaaacaacttgatcatgtaaagtcttttccatcgaagcatgtggctgatcataattgagctcactataaatttcatcacaaagaacaaaaaccggcttatcgcgaacaacatctgctaaggcatcaagttcatcttgtgaatacatcacacctgttggattggtaggataattcatgacaagcgccttaacgcgatcaccatacttgtccaatgctgcttgcaatttatccggcgttaatttgaagtcatcgtcagaagtgtcgatttgttcaaccgttgcacccatggatagggcatccccaatataaagcggaaaaattggtgttggcaccaaaacaacgtcgcctggattaagcgccgcagtcaaaaagtcgtagatcgactccgttaccccattggtgatcaaaatttcgcttgggtcgtatttttgtccatatttttcagctaaaaaatcggctgccgccttgcgcaaacctggagtcccgttagatggcgcatagtgtgaatggttattagcaatgctggcttcagccgcttttttaatatgctctggcgtgttaaagtcaggctcaccaatcgtgaatttgacgatgtccgaaatcttgttggtgtaagctgcaaaggccaaaatctgccctggcttttgttcaaccaagccttttttcatatgttttgttaagtcgaccatagtttttcctccttatatcgaactaaatcaattcaaatataggagtctttttaatctttgtcaaaggaaatattaattttgatatctaaagtgcacattaaatccaataattaacaaagcataaatactataaatagccgtaacagtcggatacattgcctgatactttatcagcaaaagaataattaaaactatcgccaaaacaatcgttaatattctaaaacgttgaaaatatgacaaaatcggtaaagccactgtcaaaactatatcagttattaagatagtaaaatccaccggatatgatttgatataaaaaaactgaaatattggcaatgcttctaacagtaagaagatataactaataatcccacatattaaaagcaactgattatgatacaatcccactaaagtggacgattgaaatacataaagtattcaattatccatggaggtgggattttttatgtccagaaaaagtaaatattcattcgatcaaaagatatgggcagttgaacaatacttgaatggtaataggagcagcgttgaaatagctaaacggcttaagatgccaagtaaaagtggagcgatgcaagtaagaagatgggttcatcaatatcaaagcaatcgtgatacccttctaagtaatgctcaatacaataatcattactctaaggcatttaaagaaaaggttgttcaagaatatttagctggcaaaatgtcgttaccttctttagctaataaatatggcattagaagcaatggaacagtatcagaatgggtttccaagtataatagtcatatagaaaatcgggactatgatccccatccggaggtctatatgactaaagcaagaagaaaaactacccagcaagaaagaattcagattgttcaatactgtcttaatcacgacaagaattacactcaaacagctgtcaaatttgattgttcttaccagcaggtttacagctggacacacaaatatctagctaatggtgaaacaggattaacagataaacgaggcagacataagaagccagaagagctaactgagttagaactggctaatcgaaaaattaaggaattagagcgtcagctcaaagaagaacaaactaagaacgaattcctaaaaaaattagatcagttagaaaggatgtgcttgccggacaaccaagatacagacaagccgcaataaaaagacgctggaaacaagaaacatatcagttaatccatgactgccatcaaaagtacaattggaagattgatttaatgtgcaaatgggctaaaatagcacgctcagcttattacaaatactttgatcctaagcgcaagccgagtaagcgtgaagaacgagacaaaaagattgaagcaaagatcattgaaataaccaagtctaacaacagtctgtttgggacggaaaagatgaccatggcagttaatcgacagatgtctgatgaaaagccggtttatcataaaactgtttaccgcttgatgtgtatcaatggcattagatcacaaaagcctagataccagaagctaaagttcaagcatacaacgcctgagaaaacggccgaaaacaagttaaaaagagactttaatgcatctagacctaatgaaaaatggtgtacagatatcactgaagtcgttgctgctaacctgcctaaggcatatctatgtactgtgtttgatctatatgatcgctatcctgttggctacgcaattagtaaacgaaacgatactgctttagttcaagcagcctataagcaggctgttaaagcataccctaatgctcatccgcttttccatagtgatcgtggttttcaatttactcgcgcacctttccaaaaccaattaaaagaccaaggcatgacgcaatcaatgtctcgtgttggctgctgtattgataatggtccaatggaaggctggcaaggcattatcaaagaaatgcgagttattcttcatcctcaagtggccagttatgatgaacttaatgattctatttgtaagacaatagattactacattaatgaagatccacagaaacgttttaacggtttaactgctggtgaaatgcgcaaagaagcgatgaaaggcaatattaagaattgccctattgcaccaaatcatcgaattgagaaatactggcaaaaaatacacgaaaagaaaataatagaagccaaaaaatcctcagctgattattaatcaactgaggaataaaagctttatgtaattctactgtctacttgacagggaatgtatcattaagtatctttttatagtctttcattaaatcaagaacttctcttttttcatgtaccagtgcttaaccagagtggtcaatgcaatgtacaaggtcaaaagtacaagaactacgagaacataatattctgggatcggaccgaatttcattaccttagccaagcttggaatgtaaggcattgcagtaccgatcaatcctgcaccgatcgtagcgagcattactacgcctgaagagtgctgttgtaagaagggaattgctggatcacgcaatgcttggataaccatttcctgtgtccagagtgattcgatgaaccagccactccagaagatggccataaagacagccttttgccctggagtagcagccacataacttgtgcccacagtacttggacaaatccagaagtaaagcaaggcaaacgtaatgatatcaaagattgaagatgtcggaccaaagaagaacatgaacttaggcaacttctttgtctcccacttacgtggtacttccaagtatttttcaccaactctatcaaatggaagtgacaaacaagatgtcccgtagatcaagtctagaatcaacaattgcattggcagcattggcaagaatggcaagaatgatgatgccactaagattgacaaaatattaccaaagttagatgacaaggtaatcttgatatatttcatcgtgtttgcaaagatctgacgcccaattcttacaccatgttccaaagtacgtaaactcttgtgcagcaagataatgtccgcactcttttttgcaatatcaacagccgtatcaactgagattgctacatcggccttcttcatggctggcgtatcgttgataccgtctcccatgtaagcaaccgtgtgaccattttccttcaaaatctgaataattctagcctttgactctggtgaaagctttacaaagaggctacattcttcaaccatctttttaacttcatcgtcgctcttaccagcaaaatctttttcactataaatgtacttggtgttcaagcctactcttgaagcaacactcttagttacagcagcgttatcaccagtcaaaatcttaacggtaatatcgtcttgctttaacttcttaagcacgtccttaacatcatccttaggtggatcaaggaaggccaagaagccagttaagatcaaatctttttcatcgctaacattgaattcaccggcttgagcaggattgttcttgtaagctaacaaaacaactctcaaaccatctttgttcaaatcttcaatgtgctttaaaactttttctttgtaatcatcagttaaatcgttgatgtgactgccaacttgcacacgattgcagcaagcaagcatttcttcggcagcacccttagttaccaggatacgaccatcgccgtggcgcttgaccacgacactcatgcgacggcgcttgaagtcgaatggaatttcatcaaccttagtgtagtcgtgtttaatttcattaacatctagctcatcgctagcggcatcgatgatggcttggtccatcaaatcgtgcatccccgtttggaagtacgagttcaagtaagccaagcgcaaaacctgtggattttccttcatatccaagttgtagtgccgttccaatacaaccttgttttgggtcaaagtaccggttttatcagtacaaagcacgtcggcggcaccgaagttttggatggagttcatctttttaacgatggtgccgtgcttcgacatttctagcgaacccttaaccaaattactagtaacaataactggcaacatttctggagttaaaccaacggcagtagcgatggcaaacaacaaggcgttgagccagttacctttagttaaaccgttgatgaccaaaactaaaggtgcaatgatcgcggtcattgttaacaataatttagaaatgttcttgataccaacatcgaaattagtttccttaacgtcgttgtttgaaatatccttagccaaacgaccaaagacagtttgttcaccggtggctaaaacaacgccaacacctgaacctgacacaatagttgttccttgatagattacatcaggatagtccaaatattgatccatgtctttttgatcgggcctcttagtcgcaatcttttccacaggcgttgattcaccgttcaaagaacttgatgaacagaacaagtctttagttttgagcaatctaatatctgctggcaccatgtccccagcgtggatattaataatatcgccgacaactacttgcttggtagaaatttcttcatccttttgattgcgacgaatattggtagttacagacaccatatttaagagggcttcaactgcgtcattagttttcacattctggataaaggatgttaatccagaaataatgatcatcgcaatcataatgatcacagtactcaggtccttttgatctgccggcacgaagacgtagtcggtaaacagcgacaccgtcgctagcagcaacaggaccattgtaaaaggagtgaagaatgattcaatgaagaaatgcaatttcgtgttgtgcttcttggtagcaacttcgttaagaccattcttctccaaacgctctttagcttccgccgaagacagaccgtctagcgaactatgtagcgtctttaacgcttcttcgggagtttgcctagcgatctgcttaacaaactctgtatcggctgtcttcttattaatcagcaacttgttttttgccatgttaatcacactttctgattaaacacgcaaacaaactaaaaaggagccaataccaattagtattaactccttatctaagcgatgtttcctcgtcgttcagttttgacactacgtgacgtaagcacaggctagctatctggatctcgccttatctcgacaagaactattttactcgttggcatctctggatgtttccgggcgatagcttgtgttcacgtaggagcctcacctaacagtttatttgctttttcaattttcatttttattatatgcatattatttgacaatgcaattatctttactaaatcgttagaaattgtaaaagaatttaagaatgataaaaaacacgtgtttgcaatgaacacgtgttttttttataatttaattttgatatactattctatagacatggatatgttgcaactatttgtgtttagtagttttagcataactaaccacccctcacacattttgaaattacggcggtgagagttatgcataaacggatagtttggaggtttagtgctccgtggtagcttgggctattgcaatcagcatcgttctaggtgctttaggcaatttagctatcaatttggctatagcctatgcgataacaaaaaaagctaatcgcaaggattagctaaaccaacagttatctgaaactacgatcgaagtcaacggattgcggccgtgggcttcttttcatatacagattataacatgaattatccgaaacgaataaaaaagatcaggctcactgcctgaccttgctattgggttagctggattcgaaccagcgcatgatggtaccaaaaaccattgccttaccacttggctataacccaatcttcaaaccttttacttgattggttctatttgaatgacctctcgatcacccaacagatattagtataggggaatgaagaaaaaatatcaaggaaaaattcaaaaaaattttgattttttcacatttgctcgaaggatactgaatctttcttttatgaattataaaattaatttgtttttttacgattataacttttgtgacttcttaaccttattcattaattcaaagtcgttggtaaaaattccagctacaccaagtttaaagtacctttttgctatgcttactttatctactgtccaaattctttgcgtaactttgctaggtaaataccaatgcggatggatcgctgcaaaatgattcttagccgcaaactgttcaggaaacggcaccggccatttgtttaaaaagcaatattgttggtggggatcaattcgctggcaattttttaaggtttgataattgaaggaagagaaaataatgggatgcacaaaatgatattcttgtgctaacgccaaaacgatggcttcaatcccctcatcatgaatcttgttagtcttaaattccaagttaacatacaaatcctgtccctgaagaatttcaaataattcacttaacatcggtaccggttcaccgttagctaaacgaaatcgcctgatttcacttaaggtatagtccttaatataacctgtcccattagtagttctatctaacgtttcatcatgcattactaccggcactttatctttagttaagtgcacatcaaattcgacaccttcagcgccatgcgttgctgcatatttaaatccttgcaaagaattttccgcaaatttgaccggtaagccccggtgagcaaaaataattgtctgagtcattttttcacctacaaaaaaatgccgctctcgcggcatctgctctattttaatctaagacgattgcaccttgagttgccaaagtatcacgaactagattcttaacatctcttctaactaccataccatcggtgttctcaacgtattcaagatattgagctgacttaatatgtgcatcataagccttgtcatcaaagtaaacttcgacaaaataccattcgttttcgttcttcttattgactccagacatcataatttccatgcctggttcagcagccatgctagtcgtcatttctttcttaacttcatgcgcaaacttttctgcatcttctggtttaacttcaactttaactaagcgcattacaaaatgatctgcgttatcattcaaagcatcatgagcctttgtggtaataacttcgggctttaattcgattacttctttgtctgtggaaatcttgtcgatggtttctgcaaaatcatcagcatgtgctgctgcaatgtgcaaatcttctgccaagctattccggaacaattcgatttcgtaattgtcttcaccatgagcatcgtcatgtgcgcttccaattaacaaagttccttcttcagctggaattgagttgtgcatgttattttcaacttcacggatatattcaccgcgatcgttttccttgatatttaatttagtaattctaaaaattggtgtttcatccatttttcttgcctcgtactataatctttccacacctatcattataaactaatgcagaaaaataaaagcccctattcaccagttatttgatcaattttaaccgctttagctggccattcagtccgtacatattccaatgtactgccttcattgctagttaactgcacaaaagaacaattgggcagacctaaaaattcacgatggttagttttttcattaatgtattgcgacaaactatcgccatgaccaacaactaaaatattatcgccatcttgtgcatcccgcatgatcaagttaatcccgcgctccattcgctcaactacctcatgattatcttccacgcgaaatttgcccaaacgatgcagcggccaaagtagcacattgcgtgcctcaaaagcgccatagcttttctcttttaattcctttaatcgaacatactccatctcaggcccagcaataatctctaaagtatcacttgccctttcttggggtgagcaatatgctctagcaaaattaattccctgatcttgaaaataatcccgcacggcttccgcctgcttaatgcctaatggtgttagcgctgaatcacagcttccctgcatgcggtgtcctttattaaaccaagtttgaccatgtctgactaaatataaattaattgccatttcgtcttactttaaaccctctgctggccacacgtatgaatcaaaatggatctttttaccatcaactgttagcttcacgattgaagcattgccaaaaccgccaaagttcttattctcggtagcatcgcgcacaaacttagctaaaatatcaccatgtcctacaactaaagcagtttgaccatcctctaagccgcttaaaatctcgactaccgcacggtgcattctagcaacaacgtcttcgtctttttccatagttgggtctacgttaggattattataattccaaggcaataagaactcatcacgaccttcaaaaatgccataacatttttctcgcaggtcttttaaacgcgtataaggcatttgatgatcagtaataatttccaaagtatcgcaagcacgctcttgggttgatgaaaaagctttgtcaaaatgaataccctgctttttaaaataatcacgggccatttcaacctggcggatgcctctttcattcaatggtgaatcacaacgtccctgaactttatggtaatagttaaaataagtttgtccatggcggactaaatataaagtttttgtcatattttcctcgctaaatcgttttttcctttatcttatcaaaaaagcacgcgtcgtgcgtgctttcatattttttcgttaaattttgaagttcttgttgtattcactcgaatttacaacaaaacttggcacactaatgaagtgcattgagtaaatattgccagtcttggaaatgctaaagccataataattgtagtccccatcatgacgtgagccctgtgtattaaataaatcaccggcatgttcccattcgcggtaaaggctcttatcattacgctgattttccccagctcctgcaaagccaaagatcatttgcttcaagccaaagtaaatatttcgcttcatttcagccatagacataatcttcttattagtagaaaaaccagccatatcttcgacataattatcgtttaattctaagccatgtttcttgcaagcccgtacaattccggcaacatagtgatcgccatctttgatactcttgccattttgctcgtattcttgcgcaattgaattagctaaggactctactccagaactataaacccacggcttcaaacctaattgactacgagcactattaattaggcacaaagagaattctgccagttctttttgctcactagcagaaagatcggcaagattgatcattttttgatcggctttgctttcacctgagctaacacgtgaaaagtcgttttgctccattcctttcatgcaagcctgaataaaactagcacttggcttccccttatatgcttgcaataaactagctttcgtatagccactcggcatcttcattgtagctgttacataattctgcgttgcagcagtctttttaacgagtttggcatttttagctaataaccattgagagttatttccaatcttataagccaaatattttttcttgcccagctttaaatactttttagcagaataagaatactctcttttagctacagcataatacttagacttcttgcccttatttgtataaagtctaactttcttagttcctttaacctgaacttttcccttaactgctgcttgaaccgtttgtggtgtcgtttcgtgtattacactagccgtccccatcaggcaaacactagtcaacaaagtcacaattaatttttgcttcatagctgttccactttctgtatgttttgattattaatatttgttatttaaattatatcgtatttatttaattaaaaaaatcaaaaagagacacactatcattttgacagcatgcctcctttaagttagtttgattttatttagttttgaaaagaggtttatttttagtaccagccgtttgcttgccagaatgccttagcagcagtccatgagccataacgacctttgacatagttatcagctactcgctcttggttagctgctgaatagtcaccattcaagtatgaagctgaaagttggtatttaccaacgtattgaccatttgaagcaccgtatgagccaccagattctctaccggcaatccattccttagcactagcttctgaaccacttacagttgaagtagtagtttgagtgttggtgttatttgctgcagtagtagttgctgcagaattagtattttcagtttgagtttggtgttgtactggagcttgggttacagcagcttgagtgtggtagccgcgagttacatacttagcacgaacccattggttcttgcctaagtcataccacttgtgacctttggcatcgtaagcagtcttaattactttccatgaggtgttgcttgccaaagtttggccagtagcctctggattcttgtagctgttgtaaacagtgattgcgttgtctgaaacgttcttaactgttacaacagctgtatcgttttctacaatagcagcttgagcagtattagtgttgttattagctgctactaaacctgtaactgataaagcagttactgcaattgacttaactaagatagatttaattttcaaaaaaattctctccttaaaattttaaaagtcataagtaacgaattttcaccttattcgtccgtcccattcaattgacacagcatatactaccttgcttaaattgcagaactataacaggaatatcacctgcagattaagaaactattgcaaagtatgtcaaaattgtaacaattgtaatatttatgtaaatttattcagatgatacaaaaccgcatcagatcgccatttaactcgatttttaatttttatttgctatgtgcaaaagcttgttcgcatttaatatattgaaacacttttgcaaaacgaaaaaagaaagagttttgatacattccctgtcaagtagacagtagaattacataaagcttttattcctcagttgattaataatcagctgaggattttttggcttctattattttcttttcgtgtattttttgccagtatttctcaattcgatgatttggtgcaatagggcaattcttaatattgcctttcatcgcttctttgcgcatttcaccagcagttaaaccgttaaaacgtttctgtggatcttcattaatgtagtaatctattgtcttacaaatagaatcattaagttcatcataactggccacttgaggatgaagaataactcgcatttctttgataatgccttgccagccttccattggaccattatcaatacagcagccaacacgagacattgattgcgtcatgccttggtcttttaattggttttggaaaggtgcgcgagtaaattgaaaaccacgatcactatggaaaagcggatgagcattagggtatgctttaacagcctgcttataggctgcttgaactaaagcagtatcgtttcgtttactaattgcgtagccaacaggatagcgatcatatagatcaaacacagtacatagatatgccttaggcaggttagcagcaacgacttcagtgatatctgtacaccatttttcattaggtctagatgcattaaagtctctttttaacttgttttcggccgttttctcaggcgttgtatgcttgaactttagcttctggtatctaggcttttgtgatctaatgccattgatacacatcaagcggtaaacagttttatgataaaccggcttttcatcagacatctgtcgattaactgccatggtcatcttttccgtcccaaacagactgttgttagacttggttatttcaatgatctttgcttcaatctttttgtctcgttcttcacgcttactcggcttgcgcttaggatcaaagtatttgtaataagctgagcgtgctattttagcccatttgcacattaaatcaatcttccaattgtacttttgatggcagtcatggattaactgatatgtttcttgtttccagcgtctttttattgcggcttgtctgtatcttggttgtccggcaagcacatcctttctaactgatctaatttttttaggaattcgttcttagtttgttcttctttgagctgacgctctaattccttaatttttcgattagccagttctaactcagttagctcttctggcttcttatgtctgcctcgtttatctgttaatcctgtttcaccattagctagatatttgtgtgtccagctgtaaacctgctggtaagaacaatcaaatttgacagctgtttgagtgtaattcttgtcgtgattaagacagtattgaacaatctgaattctttcttgctgggtagtttttcttcttgctttagtcatatagacctccggatggggatcatagtcccgattttctatatgactattatacttggaaacccattctgatactgttccattgcttctaatgccatatttattagctaaagaaggtaacgacattttgccagctaaatattcttgaacaaccttttctttaaatgccttagagtaatgattattgtattgagcattacttagaagggtatcacgattgctttgatattgatgaacccatcttcttacttgcatcgctccacttttacttggcatcttaagccgtttagctatttcaacgctgctcctattaccattcaagtattgttcaactgcccatatcttttgatcgaatgaatatttactttttctggacataaaaaatcccacctccatggataattgaatactttatgtatttcaatcgtccactttagtgggattgtatcatttcctctttcttttttaattctcacaaattttttattaatttattccattattctgccttatcctcttctataagttgacgtttattaagtgccgcaataaatggcaggtaaatcaaaatgtctaagataatattgattacttgcaaaattgagcccgcaatactgcctgttgccaaaaaaactgaaataattggcggcattgtccaaggaattacagtcccattacataatagaactaagcctaggttcattgcacaataagtggtaatcgcatttaacattggcgcaatcataaatggaataattaacaacaagttcattacaactggcagaccaaacatagttggttcattaatattgaacaagccaggtacgatggtcagtggtgctaaaactttattttgtttacttgcgcgcttgcgccatactaaatatccaatgcaaagcactaacccaatagtggcacctccatcacccatgtaaacaaagttatcgataaatggttgcgtaacgatatgaccaccatgagctaaatctaagttacctgcttgattcaatacacggttagcatcggtttgcatcaaccagattggttgcatagcagtattaactacgttaccaacatgaataccaacgaactagaacaagctcaataaaataattgaaactaatgtaccaattaaggtatcgcctaatgcacctagtggcttagccaaaatattcatgattacatcgtgaatattgccccatccaatccaagcaaaaagccagtaaacacagccagcaatagcaattacagcggcacctggaattaaagctgaaaagctcttagctacagcaggtggcacagtagctggcattttaatttggatattatgattaataaaccattggaaaatccatgcacttaggagaccaaagataatagctacaaataatcctctactacctaagtaagtgtaagggaagccttcaactggaactttatctccactcataatacttggcgtcaaaatgaagaatacagctgcagaaacaattccggcagaaacaccatctgtcttatattgattagcataactccaagcaattccaaaagctgcaattaagaccatgatcccaaaggagccattagtaatcttggctaaaatctgtgccaggcttataccatgaacagcagtttttgatagccaatcagaccaaccggcaactggaaatgaattaatgatcatgaataatgatcctacaataattaacggtatagccatggcgataccgtcacgaacagcaattaaaggtttaaaactgcctattttagcggctacaggcataatgtgtttgttaacaaacgcattcaaacctccgctcgatttactattagccataataattccctcttcaatctaaaaatgatctcgtgtttctttggtatatacctttcgcaatataacaatatcctgaaagcgattttattaccactattttaaaagataattttttgcttatatttttaaccaaagtttgattaacaaaatattgcagttatggctgtaagtgctatagtttacatgtaatcataaaaaaagcgaggaaataaaattatggctaaatacgaagtaaagttaagcgaagaagatttacaaatgatcaaagattgtcattcaaagaacccttcaatcatgaaggctatgaacgaagccaagaaagtcgaagattaagcaaattttgatctctaaatcgaaaaaaggcgtccgcaagggatgccttttttattggttttcaaatcttgtaccgtggggatgcttccagttataaacacggactattttacccatgccatctagcactacaacatttccatcattatgtggataaatcaatggatcagaatgtgaaccaccgtcagtaaaaattcttgctggctcacctgggtattgcactgttctaactatacaatcatcaattgatagccgcctcatttgtcgaccatcatcatattttccttctaaagcagctgttggcgtatgaccagtcacaattgttttgcccgttttgttatgagccatcattttcaataaggaatcggaataccaatacttatctcgtgcccaaatacggtaaaaatcatagtcaaatttcaagccatactctatctcagagtaagtttccggatcattatactgttcatctggccgcacacccgcatgaacaaaaatcaagtgtggcgtttcatacataataggacagccttttagaaagcgataatactcactatcacgcaactcatcaggcaaaactgtactgccaaacagactaactaggctcttgccaccaccgttataaacccaaatgccatcttgatgttcctgcttctccgcaaaattgagtaacatttgctcatgattacccagtagtacgattgctccttcgcttttttgctcaattaaataatccaatacttccttcacatgctcgcggccatcaacatagtcaccgcccgcaactaattgtgcttctggaaaatctgctgttgcctgcttgattaagtctaaggtttctaagttgccatgaatatcagaaatgaagatatagttctccttcactcgatcatccaacagcgttcgattgataatttttttcatttcatactaccccatgtgctaaattaaactaacatttttttcttaattatagcagatgtacactggttctttttctatgcaatcctaaaattaacctccggcaaaaaaaaggctacaatagatatgaaaagaagtgattgcaatgtttaatgaagaaaatgcaattgatgccaaggacttacacgttgattctttcaaatatcaatcaactgaagacatgccatctgatgcttattctagctgggaagaaaaacacccaaacgccagggtattcaagcttgaatttcgcaacatcggcgaaagcaatgaatggcaggaaatgatcattatctacactgaataaataaaaagtggaagaactccaagcctagtgtgtttcttccacctttttacttattttgattttctttttccttcaatttgtgcagaatccgttcattttctttagtacgtttttcaactgctgcatcgatgatcgaatcaaaccaatgattatcagaatcatcgcttgtttgatccttcttttgaggaccttcattttttacacgtttgtcagtttcttcattaataatggaatccagccaatcaaaattatctggatcatggctcttatcagtcatttatttttcctccatttttgatttaaattaatttatttactattctttttgactataattgagttaacaagatgaaacaagaaagaagtgttcgaaatgaaaattacattcactgacaaggcgcttgactacttaaaaagacgcgaaatcttgaataaaattctaattttaatcgccgacgatggtggtggtaaatattctatcaaaggcggcggttgtgcaattggcagtcacttttccattatttatgtagacaaagttgatcctgattatccaatcaagcttgaaaacgaccaaggaatcaatatttacacttctaaatacgacaccacaatgatgggaccaaatttagtggttgactacgccaatgcatccctcaacttaaagagtgacgaaggattgcttgatggcggcgttgatatcggcaatggcgccgagttaattaaagctcaaaagaatgtaaaaatgaccggcgttgaatggcgttgctagattaagatgatcagaaaagacagtagtttgaaatcaactactgtcttttttctatagaaattgaccactattaggatcgaatccagtacgatctgccgcggtaatctttctaattaccttgcatggattccccgctgcaattacattatctgggatgtcattcacaactacactgcctgcaccaataattgaattacgtccaataattgtatctggagttacgctaacccctgcacctagccagacattgtcaccaatgccgatcgaatgtgcaacacaaccaccggcttttcgctcggctggatcaaataaatggttgctggtatacaagccaaccttaggaccaaacaaaacattgtttccaatataaacaggcgcgccatctaaaatcgtgcaatcatagttggcataaaagttatccccaacatgaatattttgtccaaattcacaacgaaaattagggttcacgaagggatgctcacctgttgaaccaaagagttctttgattaatatttcttttttagcgtgatcattctcattattaatattattggtcttcaaggtagcaaggtctctcaaggtgccaaggcgaggatccgcatcattataaggacgaccagtagccatgtaattaaattttgttctaagcgacatgattctttcctttcattagttcttctatttttattatagaaaagaaaaagcgctttcgcatgtttgacgcataatatttagcacactagccctaatcttattgcttattctataatggtaaaaaagaaaggattaaagccatgaaaaacttcaacaaatttaccgctaaatctgcttgccttttacagaatctactagtagtctcaattggtttactcgggattattctgatcatactcttattccgcgatctaattccactttgccaatcattattttcaactaagatcgaagaaagcaactccgagattatgtcagaaattatcgttttcttactcttctttgaatttactgcaatgattatttcagccttgcgtcatcacggtcacactagcatcaattttctattgggcttaggtgttactgcgctaattcgcagtctgattacttctcatagtaacatttggagtacgcttgccacttctgcttcaattttagtactagtaatcgcaatggttattttcaataaaaatctgcgtaatatgtaaaaaaactgtatcactctaggctaatgtcattggagtgatacagttttttgttttactaattaactttgcgccatgaactcattaagttgtttcttagaaaaaacattgccatatttgcatactacgtttcctttcattattgaacgtaattcacacaaccaaaaaagcatcatttattaacaatattgaaaataaataatgctttttagtaatactctgatgctgaatgccagagtcgaactggcgaccttctctttacgagggagatgctctaccaactgagctaattcagcaaactcacaacacatgaattataccaaatgtcgctaattggcgcaacgacctttttctaagctagcattcaaaaaagaacattatttccaatctaagcacaatccttgcttgtgcaattcttctggcaattgatcacgatcagtttcatgcagatcaagttttttacctgtaatctgcttagtgaatgaatcaatgcgacggttagaatcacgtaagtcataatatgtcgtaactatatcatcatagtctttaaggtctttcacatcaaagtctttcttataactaccttcaaaacaagtgaacttaagtggtaatcgtggttttaattgtggcttttgatctggcataccgacttgcatccccaacactggaaaagtcaactcaggcaaatcaagcgtcttaagcaaatccaacggatgatcgttaaccgtaccaagtggcacatagcctaagcccatactttctaccgcattagcgacattttgaaaagcaagcagcgtatcttctattgcttggaaaaagatatcagttgtgtgaacacggccgtcgtctttgtcaagttgctttctaatttgttggttacggtacaagtcaacgataaaaataaacaaatcgccttctgcaccaacatatttttggttacataacttttgaattttcttcttttcttcaggatcggtaacgtgcagtaagctagcattttgcataaacatgctggttggagtttgaccaaagacagaatacaaagtttccagttgttctttagtcaaagtttgatccttaaattttctaatagaacggtgatttaattgcgtgtcgattgtttcgttatgtatcattttcatccttcttactaataatcagtaagttcattataacaaataatatggctacttttcttcaaattcaattccgtaatctgcttgctctccgtgctcagctaaatcaagccccattaattcatcttcttttgatactctaattggaataatccttttaagtaataaaacgattatcgtcgtcatgatccctacaaatatgatagtaaataaagttcctaaaatctgagctgtaatcaaatgcaacccgccaccataaagcaagccattttcaatttgcgggttaacaatcttagtcgcaaataatcctgtcaaaatcgaacctacaattcctgaaacgccgtgacagccaaatacatcaagtggatcatctagcttcaattttggcttaatcacatgaatgaagccgtaactggctagtgtacaaataaaaccaatggcaaaggctcctgccacagtaacatagccagctgctggcgtaataccgactaatccacacaaggcacccgtacagaggccaatcatagtagtcttttctttaataaacatatccaaaaacatccaaaccacaaatgacgtaccagttgcaacagttgtaattaaaaacgcttgtgtagctacatcgcttacagttaaggcagaaccaacgttgaagccataccaaccgatccataatatactggttcccattaaaacccatggtaagttataatgcttaacctcaccatttggatcaaaatcaattcttggaccaacaaaaattgataaaaacaaggcggtaataccggcggtaatatgaactacagtcccacctgcaaaatcaagcatccccgttttggctagaattccatctggtgtccaaaccatatgaaccattgggtaataaatcaagatcgaccaaattgcgacaaatgcaagtaaaaatttaaatttcattcttccgaccaccgcaccaacaaacaacgccggcgtaataatcgagaacatcatctgaaacattaaataggtcaaaattgtgatgcctgaatccttggaataaagcgtctttaaatcaaagccgtttaaaaagacacttttactcaaaccaaatattccaccaacatccttacccaaagccaagttataaccaaaagcaataaacaaaacgattgcgacacctgtaatcatgaatactgaaatcatcgtattcacagcattcttctttgaaaccatgccaccatagaaaaaagcaagtccaggtgtcataaagaaaactaaaacactagcgacaaaaacaaatagagtgttcgtttgattaatcatctttttttctcctcaaagtaaaatagttagtcctaatattttaaattggtatatacactatttcattgatgttgcagcatatatgcttaattaaaaaatattggtttgataaaatttaattctcattatacactcatttttcttcttgtcattaattttctataaaaaataaaggtgcatagacgtatggcttctatgcacctttgcatatatttgcttttaattatttgttttcgttttcaagattgttgattgcagtttcaaccaatgcatatgcttgttgagcttggttcttagcttgaacatattcgttcaagttgtcatcaccattagtaagcacacgtgcaaatgaaatttgttcagccatcaagaagttgaacaatgaatcccacttcttgtcttcaaacttgatttccttagcagaaattctaggcatcatttcacgtgtggtattaaatgccttttccaaaatttgttcatctgcatcggttaattcacgcacattgtatgcttggtggatttggtgaacctttaaaagttcttttaataaagttcttgcttgtgcatcttttgaaactgattggttaatttttaaagccatttttacctactcttttcttttttattaacaattataccaaattgtcttcgaccatttgcttaacgcagcgtttcatttctttaatatcaagaatactgtaggcaaattcttttctaagtagttcctttggcaaatattgatcgtacttgtcgattcctggcacttcgtttggataaaccagatcaagcggatcaaagtctttatcagcttcttcgcctaaaatgcgccagaagtcatgctcatcagcatccatggcaaaatacatgaagtatggtctagatgaattaaagccacggatatttaactttttaccgcacttaattcgaattaatcgctctagtgccaaaaatgcataagtcccagtccatggaaaaagacaccacatattaccgcccagcttgatcaaattattctttggcagaccagctaaagcggcggtgtctctagcttgcgtcaagcgagctttaccattttgcatcaaatatggatacatcatcttttctgcaagtacctttttcattctctgtaaaattttaggttgaatatctccaggtacatctccaaagtaggcaggaattctaccctttacttcatggcaatatacttgatgacgcttgatatccacgtcttcgacaacccatacacgtccagcaatcgcaatcttgtctcctacaggaggtggcttaacgatcgtacctaattcttcgctgccagcgtgaacactgaattcctcgttttcttggaaaactgcgtaaaatttaaagttattcacaactcgttcaccagcaagaccaacgatcagaccaccatcttcagtccactcaatgtgacctgttttaagcaagtgtttgagcaaaacgcgataatcgtcttggctcacgttgtggaaatatgacaaagttaacacccgtgaagcaagttcagctggcgtcatttcaccgcttgaagccagcgtactcatcgtctgatgatagagcaaactatatggcaaacggttaggttcaggtggctccacccatttttcttccgcatacagttgtaccaaggcaatcccttgaagtagcggccacggaatcagttctggcaacatcgctcttgattcagggtgttcttcgcgcatgacaaagtgcatctctggtggattaccgcggcgccctgtccggcccattctttgtaaaaagccagacacagtaaatggcgcgtcaatctgaaaagcagattctagtttgccaatatcaattccaagttccagcgtagctgttgcacaagtcgtcatgtagacatcgtcatctttcattgcggcttctgcagtttcacgcaaggctggagacaaattaccatggtgaataatgaagcggtctggctcatgattataggcacaatatgctctgagctcctgacaaacagcttcacattcttcacgactattggtaaaaacaagacactttttaccacgagtatgctcaaaaatatagccaattcctgggtcagctaattctggtgccttatcagttttcggttcgatttggctcggatcaaagtccctggaacttgcttgtggatttgttttataaaaatgttccatagataaatgccaaatctgtggttcattttgtacccttggtgtaacagtttttctgtttgaaccagcacccaaaaacttgctggcatcttctaaattaccaatagtagccgaaaggcctattctccgtggatttacattagctagttttgataaacgctcaattaaacaaaatgtttgtccaccacgatcacttctaagaaatgaatgaagttcatcaaccacaatatattttagaccaccaaaaagatgcggaatatccatgtgcttattgatcataaagctttcaagcgattccggcgtaatctgcaaaatacctgaaggatgcttgagtaacttgcgcttttgtgtttgagctacatccccatgccagcgccaaactggaatatccacatctgtgcataagtctatcagacgatcgtattggtcgttgatcaaagccttaagtggcgcaatatacagaacttttactgaatcttctggctcattataaatttccgacaagatcgggaaaaaggctgcttcagttttgcctgacgcagtcgaagccgacaatagcacattatgatcggtgttaaaaatttcttcggccgccgcaacctgaattggtcttaaacttttccagccatgttcatagatataatcttgaataaatggcgcataatgtgaaaaaacgtccatagtccatttccttaaatcttaaattcggtataatccttttccacattatccgaaacagcctctgacttggtatagctgaattgatccgagttaagcagatcagtgatctttctatcaggattctgccaaacaatgtcgagcagctcaataaagtcacgaataatttcacgtggcgtgatattggtatccgctccaacacgggcatattcaatcttaataaattgagccaaatcatcatcagtaatcgtgcgctcataaccgtacaaattggcatgcatgtcagctagtttttcagtcaaaaccaacatttcttcagcggttaatggttcaagcttaattactggcgcatacatatcacgtgctccttcttgagcgaatttgcctgaagcaagtcggctgcgtaaagcttcgtatgaataaactccgcgacgacggtctttaactgcttgtggcgtaccacacataataatgcctaagtaccttgctttgccctgcaaggtatcgttgtacatggtcaaaatcttttcatagttgtactggcggctaattgtattcggaattttataaatattaaccaattcatcaatcataatcattaaaccagcatagcccgcttgtctaaagaaagtcgcaaataactttaaatattcataccagtcactatcaccaataatgatatcaacgcctaattcctttttagcctcagtcttatggctatattctcctctgaaccacttgactactttagccttagtctcatcatcaccactcatataagcgtgatagtacatgttcagcaatttagcaaaatcaaaaccatgaactaattcgtttaatgaagaaatgacgccatagattttttggtcaactgcttgctcaaatttaggatcatcattatttaagcctgtttcttgcgaaacttgcatctgcactgaattaatccagcgatctagaatcaaagtcaaggcaccaccttcaggcctagtcttagttgataagttctgaattaattcacggtatgttgctaaaccctgtccttttgatccttgcagccgacgttcaggtgataaatcaccatctacaacaacaaaatttttatccatcacatagttacggatcgtttgaagtaaaaaactttttcctgagccataacgacccacgataaaacgaaagcttgctccgccttcttgaataacatccacatcgtgtaatagggcctcaatctcggcctttctccccacggtaatataaggtaaccctattcttggcactaccccaccctttaatgaattaaggacagtttgcgcaattctttttggtactcttcttttttgtggcatgatttcatcccttcaaaaacatatcttttaagtcatctacataatcggtaattacttgtggttggtcctgttcgttattttctaaaaccacatcaccgaattcatcaaataatttttcattaatattatccatcaaaattgatgccattaaatggtgctgcttcaaataggtctgccaaggctgctgcatcagcaatgcagttaagaaaaacatttcattttcatctaagccataatcattatcaactttgacagtttcatctgcttgtttttctacttcttcttgtgcttctgcctgctctagctgcttttcctcatccgttaacaaactatcacgcgtcttcgaagcattggcccgaatttgatccaaatcggaaaaatcaatcttaatctgatcaatctgcgcctttttttcttgaatgcgatattcagcaatccccgcgttaattgccttaagtacagcttgatcaataaatcgcggcttaatcgaccgacctagtttaaattctgttcgcgccactctatctaattcatggagaaaattatttaaattaacccgctgacggctgatttgttgatcacaatgaatttgccattttccttggtaaaaatgatactttcttactgcatcaatctgatggtcagctacttgttgttttcgcagataaaaaacactgcctacaaagattggcttttcaattatatcaggcttgcccacaaacgcactgtaatacgcaatgccgtattttttagcatccagcagctccagccacacgtaacgcaacagttgaacaaataacttttcattcttattaataactttagatgaattccaataagtcgttttctttgcaaagactgctgctaactcctgcgcagtaaatttttctggatggtgtaaaacctcataatcatgatcacgcttaatctcagatgcaaagcgctgcttaataatcttttcgtctaaatcataataaagaacataatctttgagccagtcttgtaaatatacatcaatactaatgtcaaattgtcgcacatatttttcttcaaattctaacagcttttcatatccatcttgtgcgtcatcaacaccaatattgttcagtaattcataaatataaacaaaggcataggatgtactcgttttttcaaaaacatgctggcgaatcttgctgcgccaagtaaagtaacttctaagctgcccagtattcatatcatgataagttggataaaaacgcttaaaggcaaaaaattcaggataatcatcatcatagtcggccatcatcctagcctgttgataaaaattcttagctcggccacgactgggcaaaatactgtagtcataaacttctagcatctttctaattctatctggaaccagactattgttatgcttcttgcgaagattttcacttggtttaattgcttgggcttgatagcggtcatctactttatctggtgcaatataaaaatattgattctgggcgatatttacttcatcaccattcatcgccagtttaaaagcaaaatcaagtgcttttttgagtgaatcttcactaactttttctaatattgtcccaacccaatctgccgccttgatcttcattggatcagtgaagccaggcaaatctcttattagtgcagccattgcaccacatttcaggtccaatatactctgaccttgcccacgtgataatatcgcaaaataaccactatcaactggtgacattaaaacgtaaacgctagtggaacctggtacagcaggcttaaatttcaaaccatatttggcatagacatatttgaagagttgatttgaatccattttgtctccttttttcgcacgtacgttcattatatcatcgatttattttttaccaaagtcacgcatgtcagctcctcatgtatatttttaagtttcataaagtttatatttttatatttgtgtggttattaacaaacaattatgttactatagtttatgtaagttattgaaagcgtttttataaaagcttcctagagaggacaaaaacttaatatgagtacaaaagaatgttattctcaagatgaattaagaaaagataatccaatgtttagccgcactcgtgccactattgaaagtgcattttacggcaacaatgtccacgaagtaaccagtgttgcagaagcttataacttagctaagaagcaatcaggcgttattgttactgacttgccaatcttacacactaaggaattaggtttgccacatggcgcaacccaattggtttacaaccacggcaagattttaggtagaactgctagcgcccgtcactttgttgacaatcctaatgaagatgctgaagcattggacggcaacctacgtgaagatatttacaagggtcatgaacaaaagtacttaaaggctactgttttagtaggtcttgacccatcattcactgttaaggctcacattatgatgccagaagatcaagccttcaaccttctttcatacatcctcaacttccacttcttcgacgatgaagctgaaaaattatacgaaaagtcaaagttctacgatgaaccagacatttacttctacttcgatccaaatgttcaagacgaagattaccctaagggcttaggcgtatttgacgctccacataactgtgctgctgtcttcaaccttcgctacttcggtgaacttaagaagggtactttaaccttagcttgggctattgctcaccgtcacggctacactgcatgtcacggtggtgaaaagtcattccactttgacgataaggacgacaagacctttgccttctacggcttatcaggttcaggtaaatcaactttgactcatgaaatgtacgatggcaagtatgacattactgttttgcacgatgatgctttcattatttcacgtgaagatggttcttcagtagccttagagccttcatactttgacaagactcacgactacccagcaggccaccacgagactaagtactacaccactattatgaactgtgatgtaaccttagacaaagacggcaagaaagttatcgtaaccgaagacttacgtaacaacaacggtcgtgttatcaagacccgctacactagtcctcaccgtgtagactttgaaaagtcaccaattactgcattgttctggattatgaaggacggttcattacctccaatcatcaagatcgatgacccagtattggcaactactatgggttgtactttagcaaccaagcgtacttcggctgaaaacttacctaagggctttgacatgaatactttggttattgaaccattcgcagacccattcagagcttacccagtttcaggtgactacagagacttcaaggaattgttcactaagcgtggtgctagttgctacagcttgaacaccgacgcatttatgggtaaagacattcctaaggaagttactaagaagttaattgaagacttagctaacggcaatatcaaagacagtgacttcaagccattcggtaacttcaagggtgtatcatacttacctattgatggttatgaagttcaccttgaggacccagaataccaaaagaccttagctaagagaatgcaagatcgtttgaactggctcaacaagtacgatgaagaacacccagaaactccaattcaagatgaagctaagaagaccttggaagctatcatcaaggaattgatctaatattaaggaaataaattagtgtctcattcaattaaaatttaatttcttaatgacgaaaagacgagagttgaaattcagctcccgtcttttttattgctcaatgtaattttgcttctgtagtttggcatctatcagtttataaacttgcactttattctcttgtgcaagttgtggattatagttatgtgctatttcaatgacaatagccggcaattggtagattatcttatgaatggcatcactatttttagggtctaaacttgaacaaatctcatcaagcaaatatatcttcttagaacgaattagacctctaactaaagcaagtcgttgtgcctgaccacctgataaattgttcgcgtcatctgaaattaatttatctaaaaaatcattgccaaactcatgaatcagtcccatcttttttgcttcatgaagcattagatcatcaggtatgttttgcagaagtgatagattctccctcactgtaccttggaataaccagattctttgcgagatcttgatgaaatcggcaggattaatttgatgaccagcaaaggtgatttcaccgttatacttcagattattagcaatacaattaattaatgtacttttcccaatgcctgaagccccagtaacaatgatcttgtcatgatcacgcaaagttaaatttataccatctaaaattttcttatcaccatatgaaaaagacaaatcttttattttcaaaatagcttgagagtcatgattatcttgtttaacactttcactttcttcaaaattatagctttttatttttctaattgcatcggtgctatgaatttgagtctgatacaaagcaattgttcttagatatcccacaaccctatcagctgacaaacttaaagttataatggccgctaccgttacgttaaaccagcctctctgcataaaaagcaagccaataaaaattggtagcaatagtgtaactaaagagattaaccatgcaatgaattgtacctggaattgacaattattcatcttacgatatttgtcttcctcattaaccaagattcgatcaaatcgtttaaagaaaagatgtctgacaccaaaattcagtatttctaagcgtccttcaaatatatccttcattgcctgaatcaactgtgagttagatttattccatttttcggttttctcattcatcctcttcttgccaatatagcttggaatcagggttagcgctgaaagaagcaaataaataattcccaaaatcagattagtttctacaacaactattgccgatgcaaccacattaaatacaaactgaactatgtcagttatcccaaagaaatatttttgttcaatttctttagcagtaccactaatcgaattgattacatctgctcctcttgcttgcttcatgtctgaattagcaaatttagaataaaaatattcttgctttaaagcaatatttaatagcatcacaattctattttgaaccaaataaaacaagagcatggctatgtagactatcagatatgcgccaaaggctaagccaataaatttataaacgtggtcaatgttactaaaattgatattagttaattgtccaaacagtacagcatttaataccccttcaaatgctgaaatggccgataaaaccagaaaaactatttgtaaatatattggaacatgttttactacccatttaaaatttatttgttgtgtgttcattgtttaatacccacatatttctcataatcaacaagccaatcttcatcatttttataagaatgattcatacactttttaaacccaattgctttaaatcatcttcatctttagtttctaacaattgtcgctcttctagagacaagtgatacttattcactaaggcatcaatattctccaaagaaatatttttaccatcagaaagatcctttcttcataccttcagacattactatacctcctattttctctcgttaagtaatgcataattttcaacttgcaatttactgtgtatgggattgatatcaatgcttcccataattccccaaatgcttataataataacagtaagtattctcttattttttaatttcaaagccaggaattcattatgtacggtcaaaaatttaaagcacttcgtcttcaacaacatatttcactagagcaagctgctaacagagttatctctccatcgactttatccagatgggagaataataagattgatattcgcttcaatttagttattaagcttttagacaatattcatataaacctaaaagagtttactaattactgcaaaattaatcatagtaatccatttgttgcgaaagtggctatgtactatgaagccaacgatgatcgtcatattttgcaattaatacaaagcaagaaaaaagaataccaaaattcacataatcaatttgatttacttctactagctatcgcatgtaattgttattacgatctaactgataacaatgttttcccagtgagctatcaaaagaaattattctacattttatctaacattgaatattggacagagatgtacatcaatgtttttggtaacactgtttttctctatgacagcaaggaactatatagtatttcaatcagaattcttaaaaatttaaattctaatacatttaatgattttcaagaatattattatgctttatcctctgtcatcaacgccctaaccgctctaattatcaaaaatcccaaattagcatcacagcttttaactaaaatagagaaagtttcaattcctaaaccaatctcttacttaaaaattagaactaatgtcctcaagtatcttttagattaccgtttaggcaaaacagatgaaaagcttatctcaattaagctagaaaatttaaagtggttaggattaacagatattgcaaaagacttaactttcttctttaaccgtataaaaaatgatcgttcacctctttcctaattcatttgcctattatattaccctcatttttatctaattgatttttctttgcaaatatgcaaaattatttttagcaagaataaaaaagcctattaaatctaggtgtttacaaaccctgatttaataggtcttttatgcgtcttttttattgctcaatgtaattttgcgccttagttaaaatatccatcttctcatgttcagttaaatacttttgtgcttctgccaaattgacccatttactagctaaaatttcttctttttgaatgttaacctcttgtcctgcaacatagctagcaacaaaataaactactgtcttagctttatcaacagtcaactgatattctgttttttctctaaaagtaaagtcaaaattcggctttaaaccaacttcttcaaaaacttctcttctagcagcttcctcagctgtctcattattttctaaatggccttttggaaagccccaattatgatttacgacgctctgcacgatcaaatatttcagctcgccgcttctacgttctctgtaaataactgcacctgcagaatgttccatcttcatttttgtcacccaacctttatattgcataattattaaatatttattaacgtatgtcaagcaattgtaatcaaaaaaatgaccagatctttgacgatctagtcactttattcgcagacgaaattattaagttctattggtagaatattttaagttacttcttcaagttcttttcgcagtattccttgaccttgtcatcatcggccttaagaatccattcaactgcagcctcagtcttcatggtgtctcgaccatttacttccatttcgtggtcccaaatagcgtcacgaataggcatttcattacccttagcccagtcaaaaacttgatccatatttctatcaattaatgcagtttcttcaatttcttttgcatctgccataattaaaagcttcctttctgataacgactttattgtagttctattagctacaactgttaacaaaaagggacttttttatttaaattctaatttttgccattaactgcttcatcagccttattcactacactaaccgcattaagtgaacgaggataaccaatgaatggtacgttttgttcaatgaccttcatcaagaattccttgtcattgcctaatttgatatttgcttgagcatgggccatcaattgaggttcacagccaccttgagctgcaatataacagaaggtaatcatttcacggtcattgtcatccaagccttttctagtgtagtaagcgccaaagcaattatcaactaaccacttattgattgttcccttcttggcaaaacccttcatttgtggaccaaacaagcgcatttgagtttcctcacccttttcaaggcgattgtctagtgtagtagttgcttgacccgcaagaggtaattcaacgccgcgcttagttaaaacatcattagtaatcttgaaaaatggggaaactctacccaaacctaaataatcaaccgcttgatataaacttccttagcttcaactgggttaacaccattgtctagtacgactggaagcattatttcatattcttccttgccttgcatccccaacaaataagctaaagttgacaacatcttagtccggtcgggcaaatcaacgtctttttgcacttcgtcaaaagcaaaatgattaattctttccaaagcttctggatcagtagccttcaataagttggcatgtactctttatgcatcttctttaattgacataataaattcctttctaaacgcttatctctactatttatttaagtacgattgagtctaaaagaaaaatatctattttttattctgcaatataacttattcttatcaaaaaaatatcctaaaggctttttgccttcaggatatttctattaggttatttaattagtttttcttgtctgcttcagcatcatggtatgacttaacgatttcatcaactaattctggatcatctttcaaatcagtagtttctacaatgacatccttcaagtcttcatctttaagcatttgcatcaacttaacgctttccttgtcgttaggttcatcaaagtgataaattctaccaacagtttccatcaatgcactgtagtccaaacctctgtccttcaattcacggattggacggataaatctttcattgtagcctaacttacggattggagttctaccaacacgagcaatatcatctgaaatatatgggttttggaatctgctcaaaatcttgttgtggtattcttccaaactttcttcggtgaattccttgttccacttgtggtaaagaagtgaacgggtttcactcaagacacgcttaacttgctttaaaacaaatggatccttaatagcatccccaatagtgtcatagccaaggctcttgccagtataagcaacagttgcgtgtcccgtgttaactgagaataactttctttcgatgtaaggttcaaggtctggtgcatagtcaacgccctttaacttgatatccttgttcttcatttggctttcgtcaataacccattccttgaagtcctcaactgagacaaacaatggatcgtcattatgttggataggaacaattctgtctacagctgcgttagggaagccaatgtacttgtctagttcaggcttaacgtcatcgtccaagtgcttataaacttcttcttttaagtgttctgaaccgccaatcatgttttcacaagcaatcacatcaagtggagtagtgttgcctgattgaattctagcagttaatcctttggcaattaatggagcaatgattgccaaaatctttggaccaatggcggtagttatcatatcggttgatttaattgcttcaactaccttgtctggatccttagcattgttaattccatcaacatttgaaacatgaattctcttcttaccaggtgcggctaattcaatgtcatattcaccacgcttgtttaattcatcaataatagtttcattaacatcaacgaagtcaatgccaaaaccattatctgctaaagtttcaccaataaatccacgaccaatattacctgcgccaaaatgtactgctctcatgtttaatctcctacgttctttaataaatcaataatttcttctggtgtttgtgcgtctgcaagctttgcaacgttggaaacatcactacagaaaatagcaatctgtgacaaaatatttaagtgttcattgttcaaaccagcaatcccaaagacaacggttaccaattgctcggtatcatccttagggtcactaaaatcaacgcccattggaatttggactaccgaaattccagtttttttaatgtacttcttaccttcgtcagttccgtgagggatggcgatgaaattacccatataagtcgacacatcttcattacgggcaagcattgaatcaatatactctggttcgacacagccgccatcaactaataattgaccggccattctaattgcttgatcccgcgttggtacgtcttgattaagtttgatcatttttggatctaattgtaatgccatttagctcatccctttctaattcaacttttgaatagcttcgccaagctttttatctttaagtaaatcatcaacaactagggtttgaatatcactgtatctgacagccaagttcttattagcagctggagtaacaattactaagtgacttggatcatcagtcaattcgttgattcttactgccttaacaggagtagtcttaccagccttcttaattgcgtcattgaataaactagttgccatagtagcggtacctaagtgttgatcgtgacggatgaagtccacttctttaactttactgaagtcgattccttcaagtgaaccaaccttcttaactggtttttcagcctttggtttatcttctacttgagttaaagctttgaagctagctacgattgtgtcatatttcggactactcaagaagttgccaaccgccacgtgcattgcatgtggagtcttttgtaaagcgcggtcagctaattcttcttgcgtgatgaccaacaaaccatcttcatctttcaagtttctaacagcggtattggttactgaaaccttaatgccagccttcttgaatttatcacgcaaaagtgaagcacccatagcagatgaacccatacctgcgtcacaagcaaagataattttcttaacattggcatatgacttaactgattcatgtgcatcttcagcttccggcattgattgacctttagattgggccttcatggcttgcatttgggcttgttttgcttctaactcatcaccagtactcttgtcgtttttaagaataattgcggcaataatgaatgaaacaactgcggcgccaagaacaccaacaatattaccgaaataagcatcctttgcggaaacaagcaagatagctaaaattgaaccaggtgaagcagctgcttttaatccaccaccaagagtagtgaataagaaagtaccagtaacaccaccaatagcggctaaaatcaatgatggtttcattaatacatatgggaagtaaatttcatgaaccccaccaaagaattcaatgatggcagcaccaggagctgagctctttgacttacccttgccaaataaagtaaaggcaagcaagattccaagtcctggacctgggtttgattccattaagaacaaaactgacttaccaacttgtgcagcttgttggatacctaatggaactaagatcccgttaccaatagcgttgttcaagaacaaaactttggcaggttcaataatgatgttggctaatggtagtaagtgaactctaataattgcatttactcctgcactagcccattgactgccaacttccataatcggtccaatgataaagaaggcgaaaatcgcagcgatcatgcctagaataccaagtgaaaagttattgtagatcatttcaaaaccagatttaatcttgtcctggaatacttgatctagtttcttcaataaccatgcactaagcggacccataatcatggcacctaagaacattggttgatcagtaccaacaattacacctaatgtaccgattgcaccagcaatggcaccacgttcttcataaaccatgcgaccacctgtataaccaattaacagtggcaacaggtaatgaagcattggttgaactaagttattaatttctttgttagggaaccaaccgtgtggatacataaagaatgcagcggtaagtccccaagcgataatggcaccgatattcggcatgatcataccggataaagctgtaccaaatttttgaaccttcactttaacagaagatttactttttgcttgagccattttcttcttcctctctcatcaacttacatttttattctaagtcaatcagtaagcgcttacaatgaaataaaaatagaactctggcacacttttgtgccagagtctgagtttacctattctattaagcttttgaactattggttacctagtaaccgatctttgaggtcttgtaaaaaaagtgccgcaattgcttctttaatttctttttgactgccatttgtaaataaatctaagttttgactagacatgataatcatgctggaaatagtactcattacccgctgttcgggtgcagtaagattgtctggtgccagcatcaaaagaactcttttgacttgaatggtatcatgatccattgattggagcgagatttcattatctaagtcaaacatggtaaatgaacagcgtgtaatttctggactacgtgtgtgtagcaatgcgatatggctgttagggatgccaactggtgccattcgtacacgtttgagaagatttttggcaacgggcatttgcttacgaattagtgttgaatccgaatgggctaaacattcctgaattactgcaattaagtcttgcgaattgtattccagttgttgaatcttgattccgttgactagctccgagcaaaataatgtactaatcgatagcttagcaagttgttcgactgaatggggatgtttttcttcaactacctgtttagctggaactggttgaggatatttttgttcataatcttttaagtaagcgcggatttttattaattcatcatcaagcagtaatggactaacaagtaaataatctcttgagaagcccttcaatctcaaggttgaaaaaataagattgtaatttgacaagtctatttgatttaaggcagaaacacggctggttttgacttctttgatttcagaaaattctctttttagtttggcacctaagattgccgacgttccaatgccattttcacaaattactagggccgataaattacgctgctgattgcgactcgtgtattcattggcaaaataaagcaagatcaactgcaactctgacgctgtcaaataattttctggaaacgctaaatgccaatatttttgaatagctagatataaatcaggaaacttttgactaaggcctgccagaatttcaataggtgtatctggtaaaagagctactttatgttgtactaaaccaataacgtgtttcgtcactttagtcataaaactatgatctttttgaaaatcccaatgcatttcttcagaaacgtgttgaacgaattcttttactttgactgagattgctaattcatgctcattataagtcaagtaagtgttgtgataatcacatgataataacttattagctaagtatgagacatcattttggtcaacctcaacttgccgcttttgcgcgaacaaggccataaaacggtaaacataaccctgatatttaagtgaatcagcactggggtggataaaatctagcttgcatcccgccagagttctttttatcgttaccgcaaaagttaaaattaactcaatcagcttttggtcactgtctagcttaattttgccaaacacgctttttttaagacaatcagcaacctctactagcaaagccttatcaatcattgtcaaaaacatatctttgcttgtcgtttcattatgcagatacttaaaaaagttatattcattgatctgattgagcataatatcaactaaaacctgacgccgtattttttcaggcgcctgaattaacagtcctacaccctttttgcggatcaagtcaatatgatatcgttttagcgacctttcaaccgtattcaaatcactttgaatcgttgcttcactgacattcaggtcaagcgcaaattgaataattttacatggctccgtacttaaaagcaacttagctgcaattatcttctctcttttagctaccgaaattacattttgactatgagattgttgcacagattgcttaatttcttgtaattgctttgaatcgccagataaaaaatattttcctttttgattttcaattttaaagtcgttcttcttcaaatcgccaaattcgcgataaaccgtccggcggctgatctttagactctcttcaatttgtttgatacttaccccactcggatttcccaacaaaatttgaagaatgtgcttttgccgttgtgttaaaaacatcccatcatcctcgcttacgtttaagtttattatacttgaacgcaaaaaaagaagacagatctcaaatctgccttcttgaggatatttattcacatactaattattcaacagtaacactcttagcaaggttacgtggcttgtcaacatccaaacccttatcctttgaagcgtagtaggcaagaagttgagttggaactactgtcaaaagtgctgacatgtagtaattaatttctggcaacacgatcgtgtcatcactatttgcgaattccttgcctacaatagtaattactgaagcaccacgtgaagcaacttcttgaatattaccacgagtaagatctgcagtaactggatcgttaatcaaggcaataactggagtgccatcttcgatcaaggaaatggtaccgtgcttaagttcagctgcagcaaagccttcagtttgaatgtatgaaacttccttcaacttcaaagcaccttcaagtgcaacagcgtgatcaataccacgaccaatgtagaatgcgtttcttgattttacaagatattgatcagctaattccttaagcttttctttaccgtcaacaatttgttggataccttcagcagcgatggctaaatcatgttgtaagtcccaatccttagcatcttgattaccaagtttttcaccaagtgccttagctaaaatagcttgtaaggcaacttgtgcagtgtaagccttagttgaagcaacggcaatttcaggacctgcacctaaaagcattgtgtagttagcttcacgtgataaagttgagccttcaacgttagtcatagtcaaacttggaataccacgcttgttagcttccttcaataccacgcgtgagtcagcagtttcacctgattgagtcaagaaaataaagaatgggtgcttgctcatcattgggaagtggtaaccagcttctgaagcgtaaccaacttcggtaggaataccagtgtagtgttcaaaaatagttttaccaactaaacctgcatgataactagtacctgcagcaaagatataaaggcgatcagccttagaaatggcatcaacaatatcttgatctacctttggttcaccattttcgtcaaggtagttttgtgacatgtgacgcattacgcctggttgttcatcgatttcttttaacatgtagaattcgtaagtaccctttgaagctgcgttagggtcgatgttcaaaacgtgaggttcacggtctacctttttgccatcaacagtttcaatagtgtaagaatccttggtaatgtcaccaacatcaccatcttgcaagtcaacaaaagtcttggtttggtcaagaacagaaatagcatctgaagcaatgatgttaaagccatcaccgattcccagcatcattggtgacttgttcttagcaataaatacgtggtctggttctgtgttgtcaacaagcaagaaagcatatgaacccttaaccaacttcaaagcttccttaaatgctgaaaaagcgtctaagttcttatcacgtgcaattttaccgatcaattgaacaactacttcagtatcagtatctgagtggaacttaaccccttgcaagtacttttcctttaattctgtgtagttttcaatcacaccattgtgaactagatagaaacgcttggtttcatcaaaatgagggtgagcgttatctacagttggcttaccgtgggttgcccaacgagtatgaccaataccaactaaaccttgttcatctggagtcaacttttccttcaagttagaaatacgaccaacagccttagttaagtattcgttaccatttaaatcatttaagtaaatgccagctgaatcgtaaccacgatattccaagttggttaatccatttaaaataatatctcttgcaggcttacctacaactccgacaattccacacataattttctcctttggtctagtttgctttgaagtaatggactagcttatttttattgttacagtaggtataatagtctttttgcaaaaatcggtcaagtacaaatattcaaaattggtattataattttaagcataaaaaatggctaccagaatttgctccgatagccatttttacttaagtcaattttaacttttattacttgtttttgatacccttaccttcatagcagtctctcatcaattgaaaaatttgactaattaatggagctgatgggttagtaacagtgttttggtcgccataagcttcaacagctaattggtccaccttcttgtcaaactcagccttatcaacgccataatccttgaaggccatcttaataccaactgattcagccaaatcaataattttctgaactaatttttcaattaattcagcatcacttgaaccagttaagccgattgctctagcaatttcagcatagtcgctttcagcacggtaaactgagtaatgtggccacatagcaagtttttctggacgcttagcattaaagcgaatgacttgtggcaaagcaattgcgtcactgacgccacttggaatatcaaaagttgaaccaacagtgtgagcaattgagtgttccaaaccaaggaaggcatttgagtaagccatccctgccaaagttgcagcatcatgcattctcttacgtgcgtcaagatcaccatcataagacttctttaagttagcaaagattgtcttgatagcttcaagtgaccaaccacgggtaaagtctgtagccatagtcgaaacatagctttcgatagcgtgacctaatgcttcaaaacctgaccaagcaattaaacgcttgggcaaagtttgaacaaattgatcatcaacgattgaaacgtctggcgccaatgcataatcacataaagtatgcttaataccagtcttagcatcagaaataatagcaattggggaaacttctgagccagttcctgaagtagttgggatacatacaagttgtacaccattaatctttgggaaacggactactctttttctaatgtctaagaatttttggtaagcctcttcaaaactcatttctgggttttcgtagaataagcgcattgctttagcagcgtccattactgaaccaccaccgatagcaattacaacgtctggcttgaagatgttcattctgtgaacaccatccttgatcacatcagtattaggatcaagagttacagccttaaagacttcatattctttttgacctaaacgcttagaaatgatatcagtaacttcatcagcaaagccttggtcagctacaccttcatcagttacgatgaagaaacggttaacgtttggcatgtgacgaaggtagttagcagcgttatgttcgaagtaagtctttgatggtacctttacccattgcatgttatcacggcgtctagccactgtaacaagtccttagcaccaatgttgtgtgagaaggtattggcaccatatgaaccagtacccaaggtaagtgatggcaacatattgttgtaaaggtcaccgataccaccgagtgcagctggtgagttgactaagatacggcaagcatccatcttcatggcaaattcatcaataatcttcttgtcatttgagtgaagaccagcggtgtgacctcgaccaccatagttcaataaatcggtacaaatcttaaatgcatcgtcatggttcttagcacggtacaaagtgaagactggtgaaagcttttcagctgatagtgggaagtttctacctacgcctttatattcagcgataattactttagttgtctttggcacatccacaccacaaagcttggcaatttcataagctgacttaccagctactggaccagcaaccgtaccacgacaaggatcaataaagtgttcctcaaacttcttaatttctcctttgtttaagaagtagcagttccacttcttaaattcttctttaactttgtcataaatttcagtatcaacgacaactgaattttcagaagcacaaaccataccgttatcaaagttctttgataaaacaatgtcataaactgcacggtcaatattagcagtcttttcaatgtaagaaggaccattaccaggaccaacaccaatagctggcttgcctgatgaataagcagctttaaccatacctggaccaccagttgccaaaatagtttgaacacctgggttagtcatcaaatcggtcgttgcatcaaggcttggttcttcaatccattgaacggcatccgcaggagcacctgcagcaacagcagccgcacgaatgattttaccagtttctacacaacatttttgagcctgtgggtggaaaccaaagataatggtatttctcgtcttcaaagcaagcattgccttgaaaataacagttgaagttgggttagttactggagtaacacctgcaataacacctttaggttcagcaatcttagtcaaacctaattccttgtcttcttcaattacgccgacggtcttttcgtgacgcaaactgttccagatattttctgaagcatacatattcttggtagttttatcttcaactacaccacgtttagtttcttcaacagccattttagctagtgggtaagcattttgttcacctgcagtagcaactgcttcacagatcttatcaacttgttcttgtgtgaagttagccatttgatctaaagcgacatgtgatttctttactaagttatcgaccatgtcgtagatttgctttttcttttcgtcctctgtaagagtctatttttgttgtgtcttagccattgtattattacctctaagatctactaattcttgtgaactaatttacaatgtcaactatagcacaataactttatttgtaaatgcatgaatttatgaaaatagtgaattaacaaagattcacatttcctcataatttcgctctaatgcaaatgaaagctattccttaattatttgtttgtgaattaacaaacttatttttaaaaaacagatttttgatatttttttaaatctaactatagagtctggtcatactaattgataatgataaaatattaagtatatgtgaaaagattgagaacattggggggcttatatgagtgagaaaaaaacacagaccgcttctggttataaacgaaccctaagcaatgcacacattcagttaattgctttaggtggaacaattgggaccggcctttttctgggggttggagacagtattcaccgcgccggtcctagcgttatcctgatatatattattgtcggtatcttcctcttcctgctaatgcgggcactgggagaactaattatgtccgacttgaacaagcacacatatattgattttattgaacaatatttgggtaaaaatattggctttatcacaggctatttgtattggttaagttggattaccttgggtatggccgaaaccacggccctaggaatttacttcaagtattggtttccaacactgaaaccttggattccaggaattattaccattgtgatcttgctgttaatcaatttaatttcagctcgtgtctttggcaacttggaattcagttttgccattatcaaaattgtcacgattattgccttcgtcatcttgatcctttacttactagtaactggtggcaaaaccagctttggtcctgttagctttgctaaccttgacgatcatggcggcttcttcgcccgtggcagtaaaggattcttacaaggatttcaaatggtaatcttcagctttattggagttgaattaattggtttaaccgcggctgaagcacaaaagccagagacaacgttgaagcgagcaatcaatcaattaccaattcgaattattttgttctatgtcatggctattttaggaattttgttagtaattccatggtccaaagttgctactaacgctagtccatttgttgaggccttaggtgctactggtattaaaaatgctagttctattattaattttgtagttatttcagccgccgtctcatcaactaacagttttttgtatagtgctggtcgattacttttctctgttacttttgacggtaaaggaaaatggaacaaaacttttggacatttatcaagaaggcagcttccacaaaatgcattgattttatccgcattattgatgggatgtgcaccactaatcaccttggttattggcgatcaggcctttaattttatctcatcaacttcaactagtatgtttttaatcatctggagtttgatgattttaactcacatggcttacaggagaaaaacaccagctaatcagctaaacgattttcaaatgccaggttacccttatatcgattatgtaatcttgtcattcttcgttttaatgattatcctgctattgattttaccaagctaccgagtaccaatggtcgctgcaattgcaatctttattgttttatacatcatttccaaaatttggagtaatgaaaaagttgtttaaagcaaaaagtcgagttttttagctcgaccttttattttgcaatttttttaattattttagcaggatttccggcaactaccgtattagctggcacatctttggttacaacggcattagccgctacaacggcgtttttacctaccgtaacgccaggcaatatcgttgctttagcgccaatccaggcgttttgtttgataacaactggctttaattccagttcttttctatgctgtggatccagcttgtgattaactgaaatcaggtaggctccaggcccaatcaacacatcgttctcaattgtaatcccgcctaagtcgaccatcatcacattggcattaataaacacgcgctcgcctaatttgatgttgtgcccataatcagaataaaatggtaaccgaatctctatactagcagctattttttgaccaattatttcactaaccaattgtctaacttcacagctacaatgccgttgtgtatttaaattctgcaataatcgctgattctgttggattagttaatcgtgatcttctgtttccattattaccactcctttttcttgctctacttcagtttaaagggtaagcttatcaatgtacaaagcttataaggtatgaagtataataacaattgtttataggtgatttaaatggaattacgtgttttaaattattttgtcgctacagcgcaagaattaaatatgacgcgagctgcacaaaaactattagtctcacaacctgctttatcgcgtcagatagcagatttagaggatgaattaggcgttaagttattcaaccgccagccgcggcacttaaccttaactcctgcaggacagtatttatatgaacaagcaaaagaaattcttactttagcttccaaaaccaagagtaacctacaatctagtgctgtcatcagtggtgacctaactattgctgccggcgaaagttttgccatgcaacgtctaatgaatatcgtcagcaacattattcgggattatcctacagttaaaattcatattctaagtggcgattatgaatttgcagaaaggcgtttagatacaggtgcagttgattttgccgtaatcattggtaatctacctttagataattatgcttctctgcagctccctgagaaggatacatggggcgttttaatgactaaggatgatcctctagcaaaaaagagtgctattacagctgaagatttagttggacgaaacatcttaaattcacaacaagccgaaaatcgaaagtactttgattcatggttcggtaattataaagagcaaattaatatcatcggtactgttaacttgaatttcaacggtacacttttagttaaaaataaagcagctattatgctcacactcgataagctagccaatatatcagatgaatccaatctaacttttagaccaattactccaatgttaaaacagccggtaacagtaatttggaagcgagaaaccaataaatcacctgtagctgatttattcctaaatcgtttacgagcatcaattgatgacgattaacaaaaataacctagatcgaattgatctaggttattttttactttatttctttttacgactaaaacgttgcttcaatcgttgccataagcttaatgccctgcgcatatgatcagctggtacatattttcttattgctcgcaatacctttttggaatcacgtgccgcaaaaacaaatttaccatttgacttagttctgatttcaaaacgcggaatataacgtccaccaaagcggacatctgcaaccacataagttacttcattccaaggaatctgaacataatcttcaacgtttcgttcgttataaaattcaaaagctctatcgccgatcatgattttgccgtatgatgcaattcctctaaaccaggttgcatcaacagtgagatcgacttttgtattaattgacttagccatttattaaagaatgccccatacgtggaagagaacaccgacaacgaagataccgatgataatccagattggtgaaactttcttcttcaataaccacatacagaagaaagttaagagcaaaccagctaaaccaggaattaattggttcaagttgtcttgtaaagtagtaactttagtactgcttaaagctttaccgttacccatatcccattgttgaagagcggattggatacctttagcacctgatggaagcttgtcccattcgatgtaaccacccttttgaataggagtttgagaaacaattggagtgaacttgatgtttacccaacgttcaattaaggcacccaagacgaacatacccatcattgaagcaccacgggtaaccttttgaagcataccacctgacatatcactggtgatagctgaaccagccttgtaaccaaattcttgtgtgtaccataagaatgcgattctgataatattccagataacgaagaacaagataggacccattacgttacctgcaatggccattgatgcacctaatgcaccaacaattggacgaacagtgtaccagaatacagggtcaccaacaccggccaaaggtcccatcataccaaccttaacaccttggatagcgtcatcagtaacttctgcaccgttagccttatcttcttccaaagccaaggtaacaccaagaacaggtgatgctaagtatgggtgagtgttaaaaaatactaagtgtctttgtaaggcagcagataaatctttcttgtttgggtataactttctcaatgctggaatcattgaataagcgtaaccaccgttttgcattctttcatagttccatgaaccctgaaggaattgtgagtgccacataacgttaaaacggtcgcgcttggttaatttagttttcttatcagccattatataaatcctcctctatgcgttcattttaatagtcatcaatgatatcgccgagtggatcgccagtgccggcatcgccagaattattgtttccaccgttgccacccttagcttcaagagctaagtacatcaaagccattgaaaggccaatagcaccaagggcgatcaaagttaagtctttgatagcagcaagggcaaaaccaattgcgaagaatggccatacttccttacttgccatcatgttaataaccatagcgtaacctacggctacaaccatcgcaccaccgatagtcataccttcgtttaaccattgtggcatcattgcaagccaacttctaacagtacctgaagggattgctaaaagaagtgcagctgggatagcaattctcaaaccttgtaaacatacggcaatccattgccataagttgatcatacgccagttacccttcttagcttctgcgtccatgatgtgaacgatagcagttgaaatagtacgtacgatcatagttaagaacaaaccagcaacagctaatgggatagcgataccagtagcagtaccaatacccttaataccttgaccaccttcgatcaagataatagctgaagctactgatgctaaggcagcatctggtgcaacagcggcaccaatgttagcccaacctaaagcgatcatttgtaatgaaccacctaaggcaacacctaaatccaagtgaccggttactaaaccgatcaaagtacaagcaactaatggttggtggaattgccattcatccaagataccttccataccggcaagaaaggcaacaaacacaaccaaaatcatttgaatagcgttcatttatttactcctaattatttattactttttttcgtcaagtaaagtttgagccttcttcaagatagcatccatattacctggagcatctgaaggaacttttcttacatcaaacttaacgcccatcttttcaagttcacggaatgtatcaacgtctttttgattcattgataatacgttgttggcgttaacatcgccttccttatatgacattgaaccaacgttgatattcttaagatcaataccgcctttgatagccctcaatacatcttctggattttcaaacaaaagaagtgcatgagtgtttccaaatcttggatctttagcaatttcttgcatcttcttgagtggaacagtatgagccttaacacctgctggtgcagcttcacgaatcatactcttacgtaaatcatccttagctacactatctgaaacaacaattactctatcaggcttcatagctggaatccaaccagttgccacttgaccgtgaagcaaacgtgaatcaattcttgccaaaacgtacttgatatgaccatcaccaataacagtaccttctggaatgctcttcttactgcccttagcagcagctttgtcagctactggagctgcagcagccgtcttaggcattaagtcagctggcttagtcttaattccatctctaccaggttgaacaactgcagtggcgatgtgctttgcagttgcattagcatccatcattctctcagtcaatgcttgtacaaccattggtaaattcataccagcaacaattgcccatttatcatgcttttcagcaagtccatttgcttggttaaatggagtaccaccccataagtcaaccaagaacaaaacttcatcttggttatcaaatgaagcaattgctttttccattttgccacgaatgtcatctggaccttcatcaggctttaagataacatgtgcaaaattatcttgttcaccgaaaagcatttgtgcagattgtgcaataccatcggcaaagccaccatggctggctaaaacaattcctaccatgtaatttcctcctctagatcaaaaaatgaatccgcttttattatacgataaatatagactttaaaaaagtgttttttgaaaataatttcataaagtgccaatttgtttcaagcagtccaaatgccttgtctcccaagcaaagacagaaattagtctaataaaaaaagaaagcctgttttcatgatttgagtcgtttttcacaaatttggcttcctattaaaatatatgctggttggataatttcattttcataaaataacaaaaaaggaagccttccgcttccttctcccctttactccggctgtcagactcgaactgacgacatcttgattaacagtcaagcgctctaccaactgagctaagccggaatattaaaaaagagcacggcagcttcctttcctcgcaggcagttgcccaccaactactttcggcgttaagaagcttaacttctgtgttcggcatgggaacaggtgtatccttcttgctttcgccaccgtactcttttgagcttttacactcaaaactaaacataatccttctcgcaaaaaaccttccagtttgcttcgctttggtcaagtcctcgactgattagtactggtccgctccatccttcacaggacttccactcccagcctatctacctcatcgtctctgaggtgtcttactgcttacgcaaaggaaatctcatcttgaggggggcttcgcacttagatgctttcagcgcttatcctttccgcacatagctacccagcgatgctcctggcggaacaactggtacaccagcggtgcgtccatcccggtcctctcgtactaaggacagctcctctcaaatttcctacgcccacgacggatagggaccgaactgtctcacgacgttctgaacccagctcgcgtgccgctttaatgggcgaacagcccaacccttgggaccgacttcagccccaggatgcgacgagccgacatcgaggtgccaaacctccccgtcgatgtgaactcttgggggagataagcctgttatccccagggtagcttttatccgttgagtgatggcccttccatacggtaccaccagatcactaagtcctagtttcctacctgctcgagttgtctctctcgcagtcaagctcccttatacctttacactctgcgaatgatttccaaccattctgagggaacctttgagcgcctccgttacactttaggaggcgaccgccccagtcaaactgcccacctgacactgtccctggcctggcttacaggtcgaggttagagcatccttcaaacaagggtagtatcccaacattgcctccaataagactagcgtcctatcttctctggctcctacctatcctgtacatgtttaaaagatactcaatatcaagctacagtgaagctccatggggtctttccgtcctgtcgcgggtaacccgcatcttcacgggtattataatttcaccgagtctctcgttgagacagtgcccaaatcattacacctttcgtgcaggtcggaacttacccgacaaggaatttcgctaccttaggaccgttatagttacggccgccgtttactggggcttcaattcaaaccttcgcttacgctaagctctcctcttaaccttccagcaccgggcaggtgtcagcctctatacgtcatcttacgattttgcagagacctgtgtttttgataaacagttgtttgggcctattcactgcggctaaccaatctcttggctagcaccccttcttccgaagttacggggtcattttgccgagttccttaacgagagttctctcgctcaccttagtgttctccactcgactacctgtgtcggtttgcggtacgggtatgtcatctctggctagaagcttttcttggcagtgtgattaccacaccttcgctacttttaattcactcctcttcacaactcgtgttgctggttagaagcatttgactcttaaccgcacttgttgcttgaacatcgttccatcgcgatgcgtgcttcacctcctgcgtccctccttcgctcttaacgatttgacacagtacaggaatctctacctgttatccatcgactacgcctctcggccttgccttaggtcccgacttaccctgggcggacgagcctgccccaggaaaccttagtctttcggcggataggattctcacctatctttcgctactcataccggcattctcacttctaagcgctccattgatcctctcgattcaacttctccgctcttagaacgctctcctaccacgtgctctttaaaacacatccacagtttcggtactatgcttagccccggtaaattttcggcgcagcgccactcgactagtgagctattacgcactctttgaatgatggctgcttctgagccaacgtcctagttgtctacgcaactccacatccttttccacttagcatagatttcgggaccttaactggtgatctgggctgtttccctttcgactacggatcttatcactcgcagtctgactcccgtgtatggatatctggaattcgtagtttatctggattcagtaacccctgacgggcccctagtccaaacagagctctacctccattatcctctccacgaggctagccctaaagctatttcggagagaaccagctatctccaagttcgtttggaatttcaccactacccacaactcatccccgcaatttttaacttacgtgggttcggccctccagtgcgttttaccacaccttcagcctggtcatgggtaggtcacttggtttcgggtctacgtcacctaacttttcgccctattaagactcgctttcgctccggctccgtcttttctgacttaacctcgctagataacgtaactcgccggttcattctacaaaaggcacgccattgcactttaatgtgctttgactacttgtagacacacggtttcaggttctttttcactccccttccggggttcttttcacctttccctcacggtactggttcactatcggtcactaactagtatttagccttgcgagatggtcctcgcggtttcaaccgggattcctcgtgtcccggcctactcaggattctgctaggcgtgcttgagatttcgcttacggggctctcaccctctctggcttaccttcccagataattcaactatctcttacactgccacgtcgcagtcctacaaccccaaatgataaatcacttggtttgggctctttcctcttcgctcgccgctactaaggaaatcgatatttctttctcttcctgcagctacttagatgtttcagttcactgcgtcttcctttgattagctatctattcactaatcaatattgcatctctgcattgggttcccccattcggatatctccggatcactgcgtacttaccgctccccgaagcttttcgtagttcgtcacgtccttcttcggctgttagtgcctaggcattcaccgtgcgcccttttctacttgaccttactcaagaattctcttctcggtcgctctacaatctgttctctttgattgtctcggttttttgcttggattatattcagttttcaatgtactagctctttgatcctttctctggatcaatggaggctaacgggttcgaaccgatgacctcctgcgtgcaaagcaggtgctctcccaactgagctaagcccccagagtattttattttcggccagacataactttaactctttttcttcgttatgtcaatgggcctaaatggacttgaaccatcgacctcacgcttatcaggcgtgcgctctaaaccagctgagctataggcccgactaacgcttggcgtttttcaaatctttgaggtactaccctcaaaactaaacaaagtttctcagtgtgcttccgcttgctctggatacttctcttagcattcctgctctccatatccttcgcttccttagaaaggaggtgatccagccgcaggttctcctacggctaccttgttacgacttcaccccagtcatctgccctgccttagacggctccttcccgaaggttaggccaccggctttgggcattgcagactcccatggtgtgacgggcggtgtgtacaaggcccgggaacgtattcaccgcggcgtgctgatccgcgattactagcgattccagcttcgtgcagtcgagttgcagactgcagtccgaactgagaacagctttcagagattcgcttgtcttcgcaggctcgcttctcgttgtactgcccattgtagcacgtgtgtagcccaggtcataaggggcatgatgacttgacgtcatccccaccttcctccggtttgtcaccggcagtctcattagagtgcccaacttaatgctggcaactaataacaagggttgcgctcgttgcgggacttaacccaacatctcacgacacgagctgacgacagccatgcaccacctgtcttagcgtccccgaagggaactttgtatctctacaaatggcactagatgtcaagacctggtaaggttcttcgcgttgcttcgaattaaaccacatgctccaccgcttgtgcgggcccccgtcaattcctttgagtttcaaccttgcggtcgtactccccaggcggagtgcttaatgcgttagctgcagcactgagaggcggaaacctcccaacacttagcactcatcgtttacggcatggactaccagggtatctaatcctgttcgctacccatgctttcgagcctcagcgtcagttgcagaccagagagccgccttcgccactggtgttcttccatatatctacgcattccaccgctacacatggagttccactctcctcttctgcactcaagaaaaacagtttccgatgcagttcctcggttaagccgagggctttcacatcagacttattcttccgcctgcgctcgctttacgcccaataaatccggacaacgcttgccacctacgtattaccgcggctgctggcacgtagttagccgtgactttctggttgattaccgtcaaataaaggccagttactacctctatccttcttcaccaacaacagagctttacgatccgaaaaccttcttcactcacgcggcgttgctccatcagacttgcgtccattgtggaagattccctactgctgcctcccgtaggagtttgggccgtgtctcagtcccaatgtggccgatcagtctctcaactcggctatgcatcatcgccttggtaagcctttaccttaccaactagctaatgcaccgcggggccatcccatagcgacagcttacgccgccttttaaaagctgatcatgcgatctgctttcttatccggtattagcacctgtttccaagtggtatcccagactatggggcaggttccccacgtgttactcacccatccgccgctcgctttcctaacgtcattaccgaagtaaatctgttagttccgctcgctcgacttgcatgtattaggcacgccgccagcgttcgtcctgagccaggatcaaactctcattttaaaaagtttgaatgattgctcattccttatttaagatctttgtctcaaatttattgcttgcgaattgacttcgcttcttgtttgggtttttacacccgcacacttttagcgaaactttgttcggttttcaaagtactacctctgtcttgcttttttgcaaagcagacagcttttatattttatcaaaccatcatttctttgtcaagaacttttttgatttgttttttcgtcttgctcaagctttttctgctttcacctgacgacatttaaatatattaccagcttatttacttctttgcaagtacttttttctttttatttgttttctttccttgcatgtctgtttttaagctctcgtcgcatctctcgaagcgactttattaatttaccttattttcttcgctttggcaagtcttgctcttcgttcgcaatcttttagaaacgcttggacgcgttgtaattatttctttatttctatttcaatctacctttttctttttgcttactttatttttatccttacgcttattattcgagttttactgttttttctcttaattttagtacaaaatttttcgaaattttttcaaaataattcaaaaaacagtgttttgcctaatttttcactcaaaatgcaaaaaaagacgtttatcaaatataatcattcgataaacgtctcattttatatctttagatacgcgtggtgctagttaaatcgttctagacaataagccaaattataagctaaaattgcaatttccaaccggctttgaaagcctatcagactacgtgctcgattgttctcggcattgtaataggtcagaagcgaaaagtcgctttcaattgttctgcgaatagccatcaattgatgatcattgtgctttttagctcctgtcatatttttacgatatggtgtccaaagttcgtaacccatttgttttagctgttgatgcagttctttgcctaaatagccttcgtcgccaagaagatagtaattagatggatgggtattttctatcagttcaactgtctccctggcatcatgaactgatgcttttgttacgacataatcaagaatgtaaccgtcatcgctaacaatgacatgaactttgaaaccatagaagtaaattttcttggtggccttataaccaatgttggcataaccgcgaaaaattttagcacgatagttgcgaattggttggcaaacaggtaccggaaagctgtcaatgatcaagaactgtccattcaggtcaacctttttattcatttcttgccgtatctgataaatcaattgcaatagctgacgtgaacgtcgattaaaacgtgagtgtgataaacaattgaaacattcacagaatcttctttgtgattcaattcctgtcttagcttgccagataagtaaagccaaaatcagactgtccgtagttttaatttgatcaatatttcgccgatgagtaaactcagccggtgcatacaaacgataccagtgccgacaaattatcactaaatctttaaaactaacttgtaaatggtggctaaaacgcttaagcttaaggcagttcaatcagatcagactcttttctattattactatttacaagtcgagtctaacaagattggacttttttattaactaaaacgatttaactagcaccacgcgtatctttagatgatcaatctttagtgtctattcatcttttttcttacgtttttcaacgccaagtaaactaatccaacctaaaccagcgagtaatgtaccaatcaaacctagtgtgtgtttgtgttcactaccagtttgaggcaataaatcttgcacggacttcggttttgcatttaatttgttagctaattgctttctttctgttttccctattgtcctcttgccagattcaacgtctgctgccttaactgggccgttagcgcgtttctttcgacctgtaggcataccttcatgcttaggattgttattagagtcatagcccttcttatttgctttagaatgattatgcttcttttcactttccttatttggctttgccggtttatctggcttcggctctggatttggttttggcttcggttgaggttctggtttcggagtaggtacttcatcttgcttgtaagtaattttaatattactgtcagccgtatctactgaaaccttttccgctgccaccttactttgtgaagcagtgtagccactaaatgttggagcagtatatgcatcccactgagtattaccatctaccctccactcactgtatgtaactttgccagtaactttatcaaacgttactttttgcgtggtaatcagcttaccacctgaaggcgtaatgactgtaattattctagttggagtcttatccaagtgatcatagttcttacttggatcaccttgcactgggcctgttggaacatcccttggtggagtttctggagtaacgataatggtgtcgtgttcaacccttacagttacagttggaatgccatcagcagttgcaactactgtcttagaaatatcctgtcctgaaacaatcttccatcctgctagagcttgtggatttacatctactgtttcactggtcttgccactaagcggagtttgccctacttctttgccatcactatcaacgtaagaaatcttccccgtttgagtgttgacagtataagtagcagtgacttcactattggcaaccagctttccagtaaccaagtcatatacggcagtccgcgtaaattcaacggtctgtttcttttgatcttctgaaatctgagctagttggcaattcttgatctggtgctaactcgtagttctctggaagcttcaaatcaaggttatcaacagttgagccagcaacgccagacttagtaattgtctgaccaacttgcttgttaccttcttgagtatcttcaaattcaatagttaaagttgcatccaaagtaaacttagcctttgaagaaatattcagcttgtagtttggatttgctttttcaagggcagtaatactttctggagttaagttaattacataaacgccagattcagctggaattccatttgcaaattcataagtcaaacctgccggaactgtaatagcagttggaacattaactttaaagtttgttccatcaattactggtacagtgctttcttgactaccagaaatcgttacattttcttcagctggactaattacataagtgaattgaccactttcagaaactgcatagttaggattatcatcttgcaatttcttcaatcccttagcagttaaggcaatgtagtaagtaccggcatttgttggcgcagaaattggcttaccattggcatcgacccattcataatcaccagctgctaggttagcagtattcaacatttcaccgcttactaaaccagttggagtgaatacaccgaagttggtagcttgagtgttaatcgttgcaggttgaccatcgtacgtcttgccatctgcgcccttactattaccgtcaagaactacattaagatccttttgtttaattgtgtaagtggcagagcctagcaggtcttcagcatccaaggcgacatttccttgaccagcgtattggttaagggctttttgcaagttaacaataccattggcactcagcttaatcgtgtaagtaccagcattaactggtgcgctgccagcattccaaatataatcaccgtcttgcagagcatacgtactttcggtagttgaacctgggaaagtaaagtgaactaaaatttgaccattgctgttaacttgtgcagttgttacagctgtaccatcaaatgtcttttggttagagccattaagttttgcgtcagcagtggctgcagtaactatgtagttagctgttgtcttaaatgtccacttgtagttagcaccattattaccagttagttgcttaagcttttcttgaccagcctgtgacaatttaacttggtaagtaccgacattcgttgcattaccaacaatttgcaaatcgtcagcagttaacttaagtgtctgagcttcaccatcagcggagtaaaccgtcgcatcgtaggttacgttgtacttattcaagttaagtccacttggtaaggtttgcttagcatcataagtcttgctgtcaccactattcagggtaacagtagcttcgccctggttaatggttaatgtacccttagtagttacatcagctgctacttgtgggtatgcgtagttagtacccaaagctttttcaatgttatccaacccttgcgcagataattccacgtggtattcaccgacattgcctggggtttgatcaaagatcaagtcaccatctttagcagtgtagcttaaattagtactattagtactatttttaccatacgtatatttacaacaacataatccttgcctggatcaggaacattaacttgccaagtttgtccagcttctttaggtaggctccatgaaccataaatcactttaaatcctggcgttgttgaatcacctgctgtttgatcccattgccaattaccataagtaatcgtgttattagcaacatttaaactaccagtctgggcatagaatacctgtatttgtgaatcaggtgcaaattgttgaccattcttgtcaccaccagcaattacatatttagccgttactgttctcgcttgctgttttactggaatatacaaaacagtgtgaactggacgggcttcataaactgaggcgttctcagtatatgctagagactccttaccctcactagatgtatcttccttattccaagttgggtaaacaaattggtttgctgacctggatcgccgctcttattgtaagcactataagaaacttccttattattttgagtagaaacatctttagtatcttctgcctgtttagttgaattctgctcggttgaatttttgctagtcaaaggatcggtaccgctaacttctttttgagcagtagtatcgttatcattcttatcagctgtcgtagtctgatcatttccagtatctgtggtagtcttcttagccgactcaacctcttctgtttctactggatccgtagtatccgcatgaaccgtttgacttgtattcatcgtccaaagcaaagttgaaagcaaaacggaacaaactccaatgttcaattttctaatactaaagcgctgcttgccttcaaagtcatttttattaaaagtcatagtctctcaatccccttaagttatgttttatctctaacttatagtctttctattacgcggttttattctattcatctattttaatcacaacaaaaaagcaggcttaaattatatgcaaaaaaatcgttattttaagttgtcattcacaacaactaaaataacgattttgcttttttaatctttaattacttaaattaaacctgattctttagtaatcttcttcataccattcatgtaaggaacaagtacatcaggaacagttactgaaccatcttcgttttggtaattttccaaaatagcagctacacaacgaccaacagccaaacctgagccatttaaagtgtgtgccaagtgaagcttgccgtcttcatcacggtaacgaatttgtgcacggcgagcttggaagtcagtacagtttgaacaacttgagatttcacggtacttgtcttgtgcaggcatccaaacttcaaggtcataagtcttagcactagtaaaacttgcatccccagttgaaagagcaactacgtgatatggcaagcccaacttttgcaataagtgttccgcattatgagttaacttctcgagttcatcccatgattcgtcaggcttacataccttaaccatctcaaccttacggaattcgtgcattctgatcaaaccacgagtgtcccgtcctgctgaacctgcttcacttctaaatgctggtgacaatgcagtaacattgattggcaacttgttttcatgaataatttcatttctgaagtagtttaccaatggaacttcagcagttgggatcaaagttaagtcacgtggcttatctggatcgtcattatcaacgatggtataaacatcttcgtggaacttagggaattgaccagttccttgcattgatgcatcgtttaccaagtatggtgggataatttcggtataaccttccttagtgttttcatcaaggaagaagttgaagacagcacgttccaaaagcgcaccagcaccgatgtagtaaacaaaacgtgcacctgaaacctttgaagcacggtcccagtctaagatgccaaggtcagtaccaatatcccagtgagcctttggcttaaagttaaattcagtagttgggtgccacttacgaacttcttcgttgtagctatcgtccggaccaattgggtctgaatcagctgggaagttaggcaatctaagcaagatgtagttttgcttttcagttaattccgcaacttccttatctaagtctttgatttccttacctacttcacgcatagcagcaattgcatcgctagcatcttctttgttacgctttttttctgcaatttgcttagaaacgtcgttacgcttagcctttaattgttcactcttagtcaaatccttacgacgcttagtgtcgatttcaactaattcatccaattcttctggcttaatgccacgcgtagccaactttttctttgaccaatcaagattctcacgaatcactttaatatcaagcatataaaacctccgtaatatgcaaaaaagagccgacttatccctacacttgggacgaatcggctcttacacggcttcgcggtaccacccagcttcagtctatctagactgcacctctttaccagacgagtaacgacgtcaaaccgtgcaactattaattgcccacattattgaaatctggaagcgactatgcattcactcgcaccaaccgtgaactctctgaagcagtcttaggatttcgtgtttgcatttattttaagccattcttcttttttgagcaaataatatttttctttaaacgaaaaaagtgcactaacttgtgtgtaatcgacagtataaacatactgaaatcctagtgttttaagcaatttctgtgatttttcattatcggcaaaagttccagcccagacttctacttgctttttctttttaaaagcataggtcaaaatcaatcgtaaagcttcagtcatatagccgtgaccttcaaacgactgatctagcaaaaagccaacttctttagtctttaataggccactcttttcatctaagccgcgttcatacaattcaaccagaccgatcacttcattgttcttgcgcaagcaaacgacataactttcaggacgcgacatatattgcttcacgccattaaccgcctcagtcagattgcgatattcctcaaagccagccatcttgtggtagcgcggattgccaccccacttcaataactgctgtgcatccttttcttcaaaaggtctcaaatatattctcttagattcaagcattagttacccatcagcttcaagagccactttgcaccaaactgtaggcctatactataggcggcaattgtccatggcttacacaaaataataatccaaaaataagtccaaaacttcattttagtcaatcctgctagcaggcaaagcacgtcatcgggagctactggggcgagaatacataatgcaaagaaccaattaaatttattctgattctctgtccacttcatatatttatcaagcgtttcttccgaaacaatatgcaaaataaagggccggccgtagtgtctagctaaaaagaagttgataattgagccaatacaaatccccacgtagttataaataaacccagcaactgggccaaagaagaccacgcctcctaataaagacacgcccccaggaataattggaataactacctgaacaatttgaatcaacacgaaaataatcggaccaacaatttgtttattagccagataagcccgcattttagcttgatcggtaaagatccccaagcggtaccaataaatcaccagcaacacgattgcgactccacaaactatagttgcaatattgattaatttacgactagccttagtcgatagatgcattttctcgccttccttcatcgcctagtagttcaattttaacaaaaatccagcccagataccgtaaacatgcaaatctaaaaaaagttttattattttagctactttgggcagatactatataataaagttaataagttattagaaaggtaggcatcttatggttgtaattaagaatgatattgtttatgacaagactaaagaattaaaaacggatatttactattctaatgatacatcttctaataccaagattttaatcttctggcatggcggtggctggtttagaggtaataaagaaagcgtaaaaaatctaggtattcgctttgctaatgcgggctttatgaccttcatccccgactactccttagcacctaaataccactttcctgctgctcatgaagatgcattgcactttgtcgactggctgttgaattctgaatacactgatcaagacgatatcaaaaacattgttcaaattggagccagcgttggcggtgaaatggcaattgaggttgctgggaaatacggtttccctactgtcacctggtctgctccagttgaatattcaaactggattaaagatcatcaagatactaaagcatccccagatgccgctaacgattttggcattaccgatcctgaaaagatcagacaatctttctacaagcacttcacattaacctacacaggtactgaagatgaggctgtattacaaaaattagacgctaagtcatttgactatagccatctcaagcaattaatgatgattaattccgcagatgagttgacaccactagctacagtattggattttgttaagttcttagctgacaaaaacttaggcgtacagctcctcgtaattcctggtcacggtcacgccatggcctatggtcccgattatgtagacgaatcgctcgattttttatatcaaactattaagagacaaaattaagtatgattaacatccaaaaattcgttcaagtcagaaaaaaactaaagttatcacaaactgagctttgccaaggcatttgtacccagtcgaccttaagtaagtttgaaaataatgggcaagtgccttcatttaaaattctcaagcagctttgtgaacggatggatattgatgttagcgatattatggacagcagtgagcacaaatatatcgcgcatatcctgtttgaagcggattttgcttttatcaattttgattacagtaaaatttttactttactttcacaaatcaaccccgaagtagacctaaaacgccaaacaaatcggattcattatcactatttgcgcggacaatatgctctaagaagtgatcgcaatcaaatgagtgcgctcttttatttcaacaatatcttgaccacccaggaattgcctgaaaatgatatttaccgcttgttggcattaaatggttgtagtcaaatctatgctaaacaaggtgaaacagagaaagccgagcactattatagtcaagtattaaagaacattatggacgtcaagatcgataatattttgactacaatgcatgccttaagtattttatgtgatgccggtgaattctatggcgaacgaaaaatgtatcgtgagtctaatgcattattgcgctatgcctataagattggcgctgagaagcacgtgattttttacatggcacgcatcctattgcggcaaggcatgaatgatattgatcagtcaaaaaagaaagcaattgctatccaacatttgcacgatgcctgtgcttttgcccgaatcaaccgcaacacgattacgctaaatcaagctaaaaaactactaaaacaattaaatggctaacaaaaaatcccaaaaattggggattttttagatgatcttataaccagtaaccggcttagcaggtactgcattaaaatcatacctagctaattgttcaagctcagtattgccatcaataattgtagttacgccttgcgcaagcatcaggttcattactttatctttattaggatccgtggtaaatggcaccagtactactggcttatgcaaagcacgtataaaaccaatttcaaaagcactaccatcatcaatgttatccatatcatacaagaaaacaccgcaggtagcattaacgattccttccaaatcattattatatgtagcaagacgccaagtcatgctacggatgccaccaatttcaggattcttttcatccgggtcaacaaaattctgatcaaacgggaaatgcactctgactacagttggattttgttctaacaatgcccgtgcttgatcaacgcgagcgcgttgttgatcattataaaatggtgagcctaaataaatcttagcggttgaaactgattcggtcatgcttttatcctttcgtgactaaaaaactattaaattatttttcattctagcatgtcttttttacaacgaaaagcccaaattactgcgtttttactgtaaacgctttataatagaaacataacttattgaacataaacattaaacttattggaggaattattttgtctagatatcaatcaattaatccatataccaacgaagaatttgcaagctatgacaattctactgccgcacaaattgacgatgccattaacttagcacacgctttatataaaaaatggcgtcatgaaaatcctgagacccgcagtcgtcaattacacaagatagcagatgccttgcgcgagcacgaagatgacttagccaaaatgatgaccttggaaatgggaaagcttttgtgcgaatcaagagaagaagttgaattatgtgcttcaatttgtgattactatgccaaaaacggggtcaaaatgttggctcctactccaatcgaatcagacttaggcaatgcctattatttgaagcaatcaactggcgttattatggcttgtgaaccatggaatttcccactttatcaagttattcgggtcttcgctcctaactttatcgtgggcaacccaatcttactgaaacacgcccacaatgttccaggttctgctgctttaaccgctaaaatcatcagacgtgctggtgctcctgaaggcagcttaattaacctttatccaacctatgatcaattaagcgatattattgccgatcctagagttcaaggcgttgcattaactggttcagaacgtggcggttcagctgttgccgaagctgctggtaaaaatttaaagaaatcaaccatggagcttggcggcaatgacgcatttatcgttttagatgatgcagatccgcaagtattgcgtaacgttttaggcgatgctagaacttataacgatggccaggtatgtacttcatccaagagaattattgttgaaaaatctcattatgaggaagtgctacatacgcttaaaaacgtcttttctaatcttaaagcggatgacccacttgaagacgatactaccttgccaccaatgaattccgaacgtgccaaggaaaaattagaagctcaggttaaaaaggccgttgacgcaggagccgagattttttaccaatatccagagattgattctaaaggtgccttcttcagacctgtaattttgactaacatcgacaaagaaaatcctatttatgatgaagaattatttggccctgtagcagaagtctttgtagttgacgatgatgacgatgccattcagcttgcaaatgattctagctatggcttaggttcatctgttatctctaacgatatcaaacgtgctcaaaacgtggccgctcaaattgaaactggtatgactgtcatcaatggccgctggattacctctggtgaattgccatttggtggcgtgaagaagtctggctacggtcgtgaattaagtgacttaggcatgatggcctttgttaacgaacacttagtaattgatgttactaaaaataatcaatagtaattttgggtaaaacaaatacgctggcaactggcacaccagcgtatttttattgctcatttttagttttatttttcttaaacagattataaccagctaaaatcgtggttaacacgctagccaaaatcataaagtaagctgaagctccaagggaaactgcatatgacataagttgactggttaattgagccagcaccccagttgaagcacctactgcgcttgacatttggaaaactatataaatcaaaaagactgattcaatcaaagaaaggaaaaaggccaaagtttggctagccttagtatttttcaagacattataaataatgaaaatcgggaacaagaataataacagccaaacaacgtaaagaatgagtgcataccatgatgttgcgccagatgaaagtaaacgtcctgctaaactgaacaatacgttagaaatagacattctctgagtataaaatgaggcacccgaatcagtaaagagaacaattaaactgactagcgctgtcaaaatgaccgaaatctgcacgtaattgaagtggggcttgcgaccatcttttatttcacgcacacgattttctacccgcggatgcttttgaacaaactctcggtttttctctttaactttgcttccacgagcatcaactcgattaaaaacttcagagccgattcgatcaatcttttgcgtcaaccgtttatcaaccgtatattgttcaatcttgtccttacggtcacacacaatataaagccaaaccattaaagctaaaaagctggtccaccctgctgctctagagaaactcattagaattaagagcaaaacgcccaataagaaaactaaagtagcattttttctaacccatgcaatcattctctggacagtagagttttgcttttcaggaataaattcttcccgataggctgcacggctgataatcttttcgccttcatctggttcttcaaactttgctttttggtgctgatctgtgaaaaagtcgtctcgatatttttttagattgaagccacagtttggacaaacatcatctgtttcactaatttcatggccacaatttggacaaacatcatctgtttcactaatttcatggccacaatttggacaagtagtcatataagaattcccttctttttcaatctgttaatgattattataacatggatcgaaatttgagaaataaaacaaaaaagaccgaacctttacgattcgatctgaaaaactatttattaattatttttcttttttcttcttttggcaaacttattaaggtcaattccctcatatgtcaacttagtagctgctgacatagtaattggcaaaatgaagaccaagatgagcaaaccaatatccacggctaaggcaacttcaatcaaagttggaatacctgatggaatcaaggctgcaaaagtaccacctaagataattgcggctgaaacaacaaccgtaccaatgatggcacatgcctttaagattcttgcacttggagtagtgtagccttcagactcaagttcacgataacgagtcatcaggaagatactgtagtcaacacccaaagcgatcaacataatgaagctgaagaatggagtgttccaagtaagcattgatttaccaagaactgctttaacaatccattgattgattgaaagtgagcagaggtaagcaataagtaaagtaccaagaatgtagattggttgcaataatgaacgagttacgaacatcaaggcaataccaataccaattaacatgatggcagcagttctaaggaagtcgccactggcaactgtcttagtatcttcaatctttgaactttgaccacccatagctaccttagcattcttcaaagcagtaccttgcaatgacttcttagccatagcacttaattcttgtgacttcttagtagcttcggttgcacttgggtttgaatcaaaaacaacaataatttgagctgacttcttgtctgggctgaggtaaacatccattgacttcttgaacatatcgttcttcaagaattccttagggatgtagaaagtatcagcggcagctgatgaacctaaacctctgaggtaggtttcaccttgacctaaaccactattaacagtgtcaatacctgaagtcaattgtggaactttgcttgccaacttaccagcgccagcactgagttgtccagcacctgtgttaagttgactgatacctgaaataagttgtggagcttgaccagctaattggccgataccactattaagctgaccggcaccagtggcaagagtacctaagccattattcaaagttccagcaccatttgcaagagtgccaagaccattgttcaacgtacctgcaccgcttgcaagagtaccaagaccattatttaatcggccggcaccattattaacttggtttacacctgcaccaaggcgactagcacctgatgaaagtgaaccaaggccgttactcaattgaccagcaccgttattaagcttttgtgcaccagctacaccttgtgaagcagcagattgaacttgagttaagcctgaacttaattggttcaaagctcttgctgcacctggaagagccttgtttgaagcttgagctaaagcattaacctgagcctttaaagtttgaagctgagtcatcaagttactttgttgcattgcagccattgagctttgcaagccctgagctgctgaagtagcatttgccattgctgacttcatcttatcagtattagcacctgattgagccttttgaacaacagattcaaccgcttgagtggcagccttagttgctgctgcttgagccgcttgtctttgatcagctggtactgattgcacagctgatgaaacagccgatgaaattgctgattgaatttcagattgatttactgaacttgagccagcattacctgctgcactttgcaattctttcaagctattttcaagatctgcagcttgtttttgaactgtagctaaactattagttaacgatgaagtatcaaccccaccaccaatagcttgattcaactgctgaatactactattaatttcaggcaaagcagtttgaagttgagcaagttgttgcttgttagagccactcaattgagttgaaagttgtgaactcaattgttgcaattggttaaccatttgttgggtaccactttgcaaactgttagcaccattcttcaaacgatttgcacctctaactaagctgcttgcaccactttgcaatgcatgagtaccactttctaaacgacctgcaccagtttgtaaacgaacagcaccgctttgcaattggctagcgccactgcgtaaacgatcagcaccactaactagttgacctgaaccgttttgcaaacgagttgcaccgctttgtaattgactagcaccgttttgtaaacgactagtaccactaactaattggctagcgccactttgaagacgactagtaccattttgaagttgatcagcgccatcctttaagctgttagcaccgttagcaaccttgtttgagcctttgctcaatttacccaaacctgaacgagcttgatcaacaccgtcgttaaccgtgtttaattgattgttgacataaagcatatcaattggttcgccgtaaggttctgtaacagatgtcgcaaatgaaacatcttttgaagcttgaagttgcttagtcacttgatcaattaacttcaaattttcttcattgtctaatctatgcttgctttgaatgtacaagtatgatggttcagccatccctttagagaagtgcttttgtactatcaacaaaccttgcttagatggaactgaatctgcaatttcatcagtgtcatcgtagttcaagtgacctgagtacattaacatgaatggcacaacaacaactgctaacacaaccaagtaaataattggatgcttcaatgtggcagatgaaataccatgccataacttgtcatcactttcaccagtaaatttcttaactggccagaacatcttcttaccaagcgtagccatgaagaatgggttgagtgttaaaagcactaccaataaaacagcaacgccgaccgcaacaccaacagctgattggtaaacggagaatttagctaaacttaaagcagtaaaaccaattaagatggatgaacctgagtaaagaattgttttaccagcattgcgcaaagcgtcatgcatggctttatacttgtccatcccttttcctagattttctttaaacttgtcatacagcaaaatgttgtagtcggtaccgataccaaagagcacgataaccataaacacttgcgtaaagtttgaaaatgggaaattggcgcttttaactaaattagtaacaattgagaaggaagtaaggaatgaaacaccaactgtcaacaatgaaataagtggaacaattggtgacttaaatacgataaccaaaacaataaagataaagacaactgtaatggcttcagtcttcttaattccttcttgaattgaagcggagaagtcgtgctgcaagacatccgcacccgttacataagtacgaagcccttgcgttttcgcggccttgttcatttcgttataaactttttcaatcgtaccatgactcttagccacattaaattgtgctacccaagtcgtgccatcttttgattgaagtttctttcttgtagcaatattggaatctggaagtaatgaatccttgattccgtacttgcctttatcattagtgaacttatcaagcgtattattaatagcctgtttatcggcatcagttagcttgccactctttttgttaaaaacaagtgctactgcataagtgtttttctttttcgagccccaattgttctctattgactgtgccacattgctttgcacattacttggcaacgtaatgttagagtgatcattagtcagctgcgtaatgttaggcaaagcaacaacggaaataatcaatattaaaatccacgcaatcagttcgaaaacatggttcttcagaaatttctgcactttcctatttcctccctatttgttgtaaatcaggtactggttctacaagtcgtaaaatcatttcatgataattacgattagattcatcttctgtttcatctccaaaagacttcgatttatccaaaaaaacgtaccctaatacggcgccaattaaagcatgaaatgaaatgacactttcttttttaaaattaagtctttcacccattttaattaaatccaagatttcttgattgatggccgcatcctttggatattcgttcaaatgatacagaatacttgataaagccggatcgcttaataaaaagtcgcgcacaacatccgcaaacttaagcaatgcatccctacctgacataccaattaaatcattcatcaactcatgacgtaggatcttaatccgtcttgcaccaactagtgatagcaattgtttgcgtccggaaacgtaatgataaagcgactgtgagcggacatcgagcgccttagccaatgctggcaaagttgtagctgtcagtccttttttagaaattaattcagtagcttgatcaattattttatccagatcaagatttcttttctgtgccattttcatccctcctttgtcttagcatagtaaataatatacacctacagtgtgaagattacaatctacatagtgtaaataatttattttttctataaaaaaataatgaagccttctcggacttcatcatttccgttacttatgcttttttataaaccaaccattaaccgttttgcccaatttattaaaattcttgtgttgcgtgctccaaacagacatacagtaagcacgtccgttagtctgtacaattgcgacagcaaaatcatcatcaccaattgcataaatgccgccacttaagccagaaactaaacttggtcgctctttagctagggttgctaaaactcggctagcatattgccgatttaatacccgaccttgatacaagccaatcattgttttagctaaatcattagctgttgtctgaccagtcatatttgagttgaccttagtttgagtggcacccatttttttagcaacttggtcaatattattaactccaatttttctagttaaggcactagttgcagttttgttacctttaagcattgcgctgcgcaaataacttacaccataggtaataccaatttgaaacatcttatcacccttggctttgtcttttttgctaatcttaatcgcagttcgcgaccccatcttgcctttttgttcttgctcatacaaggcgatcagtaaaaataaccgcattgtttttcctgcgtcatgagccttattagtattagaaactacggcaaagtgaccagagttagttaaatcctgtgctactacctggaagctatcatcaatgcccataacttttttgatttgcttgactagcttctgattactgcctttttgagctttaacatggttagaatattcaatcgaattaaccttgggttccttaggcttttctaattttttaacctttggttccttggtcttctttttattcttagcgaccttgctgttatttggttcaacaatctttaactgcgcgttttccacccgctttatgtttgatgtatacaaaatgaatgcaaataaagtcacaattaaagaaccaattaatattttatgtttcattaaaacgcctcaattttagaagaaatgatgccttttcatcaaaatgactaaccaaaccattaaaacaaccatcaaaataatgattaaaacccagtcaaatgaattttttaaaattggtagactaacattcatcccataaaaaccggttaaaatagttggaatagttaataccaatgaccacacagttaagaattgcatggtgtcattcaaattattgttcatcatattattactggtagctgataaagtcttagttacctgctgggaaatctgcaccatttctgcagactggcttgattcaatcaggacgtcatccaagcgttcactggcttctttagtgaagtctaatttgctgtgattcaggacatgcaacatgattaaatccgtctgaattgaacttgataaataaactaaacttttttcaatattcgaaagttccaccaaatctttattgttaatgtcatcagacaacttctgatctaggctgttacgttcaacgtcaagttgcgttacagcacgctggaagtattgtgatgaatataggaaaaagagcatcaacaactcagtaacatctttagcttcagacaaacgctcccgcatatgttcatcgttgaattcatcaaacacatagctggttgattctgtatggaaagtaaagatattttcacccactactaaaaaagtgattgggtgtgaggtaaagtgcttaatcgtgttggtcggccaaattggcacatcgtaaacaagcaagtggctcttagtatggacgtcatagtcatagtgaggacgttcgtgacggtcagaaatataagagataatgtcaggcgtaaaattaaaatcctgctgcaatctctcactgtcttcttcacttaaattattgatgtcataccacttatactttgttcttaccggaaaattttgttgtctaatcaaccagctcacctcaacttttattttattacctagtaaatggtaccatttttctcaattctttttccacaaaaaaacagaccttacggtctgctctttgaaatctaattgctatttaattttattgcttccaagcagcatcaaatttttgcttaccagtattaatttggatgttagtattttgacccttttgggctgcagcaaagatattttgcaaaatgctgttcaattggttgtatgcagcatttgaattcttagcaacaggaacactgtacaagttcttcatagcatcttcaagtttagcaggaagcttgatgctcttgttattcttgtattcactagattcgattgcactattgtttacaggaatgtaaccagtagcattagcccacttaatttggcttgacttagatactaagaacttaatgtacttaaatgcagcagctttttgttcagcgctagcgtggttaaacatgtaaatatcagtaccttgttgcatggtgtatttgccaggacgtggagcaacatcataagtaaacttgttacctacaccttgcttaacaaagccttcacctgcagaagtaccaacaaacattgcaaccttttcgttagcaaatggacctgaaaggtagtgttctgaaccagctactctgaagtaacccttcttaataccatctgcatagaagttgagaactttctttgaagttgaaccactgaagttaatcttatcagtaaagttcacgccttcgtccttcataccaagagtgtagtagttggatagtgaatcaaaaccagcacctacaactttgtggttactcttcttgtagatagtttctgaaacatccttaagttcttccatagtagttggaactttcttgatgccatatttcttaaacatggtcttgttgtaagtcaaagtttcaattgacttgttaaatgggataccgtattgagttcccttaatttttgcaccatcaagaagttcagttctaatgtcagatgcctttgcactgccccaaccaacattcttgttgttgatatatggggtcatgtttacaagcatcttgttttgagctgcgttccaaagccaacctggataagcttgagtaatagtaggtaagttatttggtgattgcaaagttgagttgatcttagcttgcaaatcattgtatgcaccttggttttcaagcttaacagtaattttagggttcttcttttcaaattcattagttaattgctttaaagtagaaccttgtactcccggcatagcgttccagaagacaactgtagtcttcttagtaatctttgatggaatcttctctgaacttgatgaagaagaattgccgctctttgaacaagcagcagtgccaactagggccaaagtagcaacggcagccatagtaagtttcttactaaacttcatttggataaatcctcccaaaaaataaaactaaacaacaatatgtttttgatttactaaagcgtgattgtttgaccacgtttaggtaaaatccgttctccatatgggttctcttccagctctggatgcaatgtgtgcaccggtactaaaacagctggttgaaccccagcaatgatttccttgagttctttttcatcggcatggcctgaacagcgcaacgccttatactcaatatcattgttagctaaagcctctacaaatggtttgtaggcaggatcaaaatcccctaatggctcagcatttgagtggatatacaaaccacccttttgcagcttatcataatcggtgacaacttgccacatgtatttatgattatctgctaaaagctcatcatagctaacttctagctctggcttaaggtcagcatagtgctcctcattaggcatgtaatagtaaggatagtcttcatccaaactttcattaatcaaatgggcacgctgagcatgtaaaacgacctttcttggtgaatcggcaatgattcgcaataatcgttcaacattagtaggataagtattaaaagtgatttggcgttcaggattagccttttgcaggcgcacgatttcttcagttagttctacttcattcttagggccagtaaactcttcactgttttcatcatgcttttcttctggccaagaaacaccagtaccttcaatgattagcatatcgctatttttagctgcctgcataaagtcccgcacccaatctggatgatagccatgcaagcgaatgtcgccagtataggcgatttgcttatccggtgtcttaactaatagaccagtagcaccgtaagcgtcatgatcactaggatatatttccaggataatatcgcccaccttaattggtttcttgtattctgccgcgatgattggacgagtataagtccgatcatgacctgcagcaggaagcaagaagtcgcccttttcattcaaggctggcaataaatgagctgtaattggacctgcataaagtggaatttctggggccaaaaagttcattgccttactgtgatccaaatgtagatgcgaaatataggccgccgcatgctcccagcggtcagtatcaattggcttacccgttaatttaggatcgtaaaaattaggcacatccccgattaatttatttttaatcagagtttgataactttcatctggcaattttaactctggccgataaacttcccccaagtcaaacaatacatgcgatttgttataggccacttcaatcatcggtccaccaattgtggttaaaccattataaaaagttactgtcgttttatcctttaaggtcattgcgcactactcctcgaataatttgctttctaaagatgaagtacaaaatcaagattggcaaaacagtcaatgtggcagcagcaagttgaagttgagtttcactacctgcatcagatgcaaatgaagttaaaccattgttcaacaatctcatgctgtcttcgttagttaccaataatggccagaggaatgaattccaaccagaaatgaaacttaataaagcaacggtgaacaagccacctttagacattggcaccaaaattttccaaatatattcccaatcactcgctccgtcaatcatcgcagctttataaattgtctgtgagattgaaccgaagtagctttgcaagtagtacatgtagaaaattgaagttaaaaatggcaataccaaaccaatataagtgttcaacaagcccattctggcaatggtattgtagttagtaaagataattgcttcaccaggcaccatcaataatgataaaagtaccatttgaacaacacctttacccttgaacttcaagttaaccatggcaaaagcaccaagcaaggcgttaaacaaactcacaattgtcgttacactagctgtgataaaagtgtttaggaagtaacgagcaaatggagcttgggcgaatactttggcataatttgaccattcaaaatgcttaggaatgattgttggtggaatagtggttgtttctctaaaactcattaatccacccaaaatcatgtagataaatggaaagacagtaatgattgcgaaaatcgctaaaataatataagcaatcaaagtgccccaacgaatcttcttcatcctttactgtcctccaatcttcttcatcatcttgcgttgcaagaatgtgacaaacataatgatgataaataagacaaccgttgcggccatcgctacacctggagtaccaacaatttggaacttgttatagatgtagaacactgcagttgtggctgagttaccaacacctgcttgtccattgaataaggcataaacagatgtataaatcttaaatgcagcaatgatattcattgttaataagaaggcgatcgttggcacaagctgcggcattgtaatacgccagaacttttcagtaccagttgcgccatacatatccgcaattgtgtagtaattagggtcaatgtttctcaaagcccccatcaagataacgatgttaaaagctaaagaagtccaaacaccaaagatgataattgtcgtcaatgacatcgctggatcatcaatccagttcggtgttggtaagtgaaccgccttgagcaagaagttaagcaaaccatagtcaccgttaaaaatataacggaatacgataccaatagcgatagttgacgtaacatatggcataaagaaagtcgtttcaaagaatgacttatgctttatcctgctgaaaataaaccaggccaacatgattgaaatagccaaagcaactggcacagaaattagggcatacaaaatagtattcttgattgcccgccaaaattctggatcactaaagatatattgataattgctgaagccgctccaattcagattaattaacgagccgctttgaaaactcattacaaaggcccgcaaaattggataaatactaaagaaagtaacaaagataattgttggcgctaaaaagagccacgcctttttctgattgctcttcattagtagacacgctctccttccttagtaaacaggaatactcgatcaagacgcatcttcaaattgatattattaccaggcttaattggtgtctcaaggttgactaatgaacgagcttgtaccccatcatgggtaaacttcaaaattcgttcacgaccgattaattcgatatcatcaactttagctgaaactgcaccatcttcttcaactggcaaaatattttctggacgaacggataaaacgtactcgccgtcagttaagtcacgtttaaaacgatccttgtctaaatcgtccacgttaatttcaaaatctgagccagtaatcttgccgccattaacctttacattaaagttatcaatcacaggattaccaacaaaattagcaacaaagtagttattgggttcaagatagaagttttgtcctaagtcatcttgttggatcacaccattattaaagagaataatcttatcaccgattgacaaggcttcttcttgatcgtgagtaacaaacaaggtggtaatacccacacttttaactaaagcacgaatttcttcacgaatcttcaaccgtaaacgtgcatccaagttactcaatggttcatccatcagcagaatcttaggttgttgcactaaagcacgagcaatagctacacgctgctgttgaccaccagataaattgcccggcttttgatcagcaagttcggtaatctgggtcgttgccatatatttttcagcaatcttcctcgcctcatccttaggcatcttttgcttgcccacagtcagaggaaacattacattctgaagtacagtcatatgtggatataaggcatagttctggaaaacatagccgatctgacgatccttaggtgctacgttaacaactgacttgccatcaaaaaggatgtcaccgctagttggattaagcaaaccagctagcatatttaagatggttgttttaccacaaccagatgggccaagcaaacatacaaggtcacctttttttacggaaaagctaacatccttgattgcttcatgaccgttatcataaacctttttgaggttctttacttccacgaatttctcatcattcataagtttcacgcaccactatatattgatttaaatttttaaatttctctattaattctaagctaaatatacgaaaataacaaataattttcatttgaaattcggggtttcaacgactttgtgaaatgcttctcagcaagtattcggcttttgttcgcatttacttttatttttcacttatttctttttgaaaattcgggtttactaaatattgtggtaggtaccaaaaaagccatgaattagtcatggctttttgtatcataagttatctccacgttcaaattgatattttgaactattcaaggcttgacgaaccaacttgctcatcaagttcttagtctttttggtaatcacaccagcagtttcatcattagcgctagttaaatatttaataagctctctgccttccatatttttagctttttcatcaataagatcaattcggccaataccgtagctttgacaatcatcacggtaggcgtttacctcataaatatattgatgatagcgtggttcaacaagcacttgtaaagttttatacaaccagtaagcactactatctggatcaaccatatgatctgccaccttatagttaagtggtgtatcctcaatattggtgtagaaaggaacatatggtgaatatgcataaaagcccatattaatccattgaattgcagccatcttggcaggaacatcatttctaatttgcaagatgcttgattcctggtttctgtctaaagcaatagaacggaacatcttttgttctttttctgaaccagatgaaaaagtgtccattggatcgtatggtgtaccgttatagtgactagttaaaaatctttgtacatcttcaacaccaatcttattttcgggaacgcgcgtaaatggcatttcttgactagttgggtcttgttcaatgcttggattaaacaacttctgtccataccaagttcttggagtattgtaaaaagcatcagcttcatccttagtaccaaaaatatctctgaaagaaaagctaccgtcagtactattgtttaaatgattcttttctacgaattctcgaataccagctgaatacataaagttatctggatcatcaaagtcaacattttgaatcaccatgatgttaggacaaattgcgtaagaatcatcaggaacacgagccgcaacccattggtgacccgcgccagtttccagataccaaacttccttgttgtctgaaaaggcaataccgttgctttcaccggtaccatatttttcgattaattgccctaagcgcttaacaccttcacgagcagtcttcacgaatggcaaagtaatataaaccattgagtcttcgttgattccatttgctactaaaggatcatgtcctaagcagcgagcattagtagcttcagtttcagtggctgacatggcaacgttatattcgttaatgccttgctcgtcccagcgaccttctgaatcatcagcagtagggacagcagtccatttgcagccatcgccctcaaggtgcatcttaaagccgttatattttgatacataatcttcatcataatgacgggctgggtttaccacaaaaactttttcgttaatgccaccataaccgtcttcgtcacgcgcaatcatggttgatccatcgattgaagcgtccttaccaactagcattgcagtacagttatcttttttcattattgtttgtacttccttttttatttcagtaataatttttcatattattaattctactactcattaacctgcatttgccgatcaacttttgctcgaccgttattatagttaaaaacataaccgggctgcacgttatagagatagacattgaagtttaaactgccatcagttgaaacggcctgcaaattcacgccgcgggccattaactcattaccacgaaaaacagcagttgcttgataaattacacgcttattctgccgcagtgctctcctaaccttagcctcaaaaatagtctgaatcttttggttagaataagcggattgcgtaaacagattcttaggattattttggtcccctgattgattgcgtggatcataattgccgctttgatcaattccagctgagactgaataggcaatcaagtggccccgattatagatttgggtaccgttacggtgattatagtgccagccagtcggttcaacatattgccttactcgcaagctatcattagccacattgcgcttttccaaaaaggctgtattagagcgcgatgttcgattcaatgaatcaaggttagagtaaatcacccgatttatcttccatgcgcctttgaccaaagtcgacttatcatggttgacttcggtataagcgcgactgccactcttaaaattcaaattagctaatttttgataatcagttggcgatagacctccataattggtcttggcttttgatgcatcgctaattgtattagttacatgttcatcattattgccagtaaagtcacgcaaaaactggctaccatttggatcgctgccagctttagtaaaaactccccataaaatcgcgattaagacaattaatgatgaaacaaccgttccttgtttttttcgtcttcttcgtgtcatctttttcctctaactacgagcccaatcatcaagcatgcttaagaaaaaggtctccgaaaaacgcttaatcttagcaccatttttgatcaaatcacgtgctgcattcaaatcctgattatcttttctaaagaaatcttgatcacccatgattaagtaattagtcgttgctaacactgaattgtcaacttggccgcccatattgttgatcatcttgcccgcttcagcttcgttcatatgaatattgccagacaaaacgatattcttattttgaaccggattgtgccaacctaagtcaacataatccaattcgccagtagttaggtcgatattcttaatcttgctttgtgccttttccaataaatcatcagtaaagcgctgggcaaagtcatcataaaccttgatcgtatcaagagaatcctgcaaaccgtggtgagcctcaacttgagcaattccagcccgctgcatgcagtcaagcagacggttatggcgctcgcgtggataatatgtccgcgccaaacgcaatacgtcaacgtaatcattatcaagcactggtaagccatatttttgacttaaatcatacaaaaagttcaagtcaaaattgacgttatacccaatgataacgtcatcaccaataaactcacgaaattcacgaatagcctgctcagccggaatcccttccttcacaatttgcgcttcagtaattccatttagcttagtaataaaagcaggaacagaattattcttggaaaacttcaccaaattagtatattgatcaacaatttgaccgttacgtaccttaaccccacctaattcagtaattcgatcgcggtaaggatataagcctgttgtttcaatatcaagcattgtataattggtcaaaaagtcaggcttttcctgtccttttttacgcaacttgtcttgcgcaccggttacatgtaaaattccattttttatgtaaatactcattcttcacctatttaattatttaatcaaattcatcagcatctcgtgcgaattgctatcaaaacccattgctcgtttcttaagatcagctggcaaatctgcatcagctaaatcagcggcaatataatgccaattaggaaattgctgcactagctttaccattggatcaagtaattgaggactggtctcatctacgcctaattccaaaattacgacattcttgtcctcggctcccgttagaaaccaacgaaaacgcgtattagcatcggtatcagggaagaagttagcattcagcggcatatgcaattccattggactattgcagtcctcgcactttggtactaaatctgccgttacgttgccgttcttaattgccgtcataaagcgttctactacttcacggttatccttttgaccatgattaatcccgctagaacactgcattttagtccaatcaccaaaggcattgaaaattcgattttcattaaagcctgcattttcaaaaaagtgcccgaatgtactggtcgcaataaaatattttttatcacgaattagcttttttagagcaagcatcgtctcactaggctcatattgtaaggaatattcgttgattagctcactcaaaaaagcccattgctcgctccaagtatcaaatctcttatctaatgcatccccaattgtatgcacatcatacttatctgcaattttgccaaattgatcatcaaagccttcttcacttaggatatctagtccctcttctttggccatgccattaccagccgttacgatcaccgtgttagcatttttcagccatttttttgctgtcactaaatctgccattttatctctttccctttgaataacctgtcaagcgtaattgtccattaatgtattctcctaagaaaacatcactgatactattataacctgcctcttcaacttgttgctgtaaccaagcttcgcttttgtgaatcaactctaagacatcaatattagcctgaccatcactaattattgggaaacgaatgttagcttcatcattttcaataatagttaattgcccgttttgctcaaagatacaattcttaatcttttcaacagagtagatacctcgactgcgcaatttaaacattaattcattagcggagattcctgctttcatacagttgccaactaacaccttgccatttttaattacttgaacaggtttaccatcgataatccctctaatccaattattgtgatcacggctgaatttcaaaataaaaacaaccaacgtccaaacaattagaactaggaaaaactgaagaattgtaatactaggattgtaaatcaagccaccaataattccacctaaaacataattctgcaactgatctaatgcagtcgtaggagccagattagacttaccaaagacattgatttgaatgattaaagttaagataccgagagcaaacttaatgaataattgtgtgtaatctagctgcattattttattacctctactttatgatcaattacatgggcttgcgttaatgtgtaagtattgcgatcatcattaaggtttaactgataatcaatatttttagaatcaatccttacgatcatgccattagttaaaaccgttgaactaactaaaacatcagaagtcgaaacattttcatctttagcaatcgatttgatgaatggcacgatttgaatcgcctgtgatttttgcgtattaagttgcacatatttttcatattgcgtaccggcaaacaaaagcaaaaataataaggcaataatacccaaatcgcgatacttggttgcaaaacggttatgtaaatatagcaaagcaaaaattatcattgctaacgccgagactgtcaagaagtttgtgtaaataatctctctcgttgattgacttttttatttatcttttaatcaaagtaggattctaaggtgtcctgaacctgaccaaagcctttatgaattcgattgaaataacggtcattgtagctcattgcctgaataccaataaaagcatcaagcgactgttcagttggaaactctgccttaggcttagctttgcgcttgatcacattgttaaatgattcaatcatgttagtcgaataaattgaagctctgatctgcttgggatagttataaaagaccagcagatctggttctatgtctttcaagcttctgataacatggctgtaaaccttgccccatttggtatagaagtcatgcaggacagctgtggcttcttctttgtttgtctgttgatgcacctgtttgaattcgttcatgatcttttcacgatcgtcgacgcgtactttagcgcagatattgcgcatgacatgaaccaaacagcgttgaaaatgagctttaggataagtcctggccaaggctgttttcatgccaacaacaccatcagaaagaaagagttcaacttgcttcaagcctctggacttcatgttttgaagcatctctgtccagacttcaatgttctcactaggagcaatgcagtagtcaatgacttccttatgtccattaggtttaatgccaatggcaatatagactgcttcacgctcaaacgtttctcggcgcaaaggaaggtatgtcgcatccaaatagacgcagaaaaacttgtcgcttagcttgcgtttgtggtaagcctcaacctttggaatcatctgcttggaaatatttgatacctgagctggactgtaatggctgccatacatcttttcaattagatcggctatttccctggtggtcacgcccttggagtaaagcttgataatcatgctttccaagatatccgagtgctgcttgtagtcaggcagcgtgtgctgatgaaattgaccgttgcgatcccgaggcacttgcacttcaattgggccaaattgcgtatcaactttgcggaaataagcaccatttctagagttgccagtattccagccatttctggcatagggatcatagcccagaaaggcagtcaattcagcttctagcaagttattaacagcctgttgtagttctttgcgcaataaatcatttattttgtctggattgaatagagcttgagcaaaatctttggtaaaatcattcatgaaggagttcttctttctgtatgtgttttttgtgttcaaaccaatcatacgagaaaggaactcctttttctaatgtttaaagaaataaatttaaggaatcattcatccttacacaaactattttacagtctcctaacgccgccaccaacatcaaagcatataatactgcctgattagtattctggttattttgaatatatttcattgtataaaaggtcatgctctacctcacccttcatatttttctttcattctaacacagaaaaaaagtagcactttcgtactacttttactagaaattattcacttttcactattattaattatttttgaatttcttttaatccagctttgcgacggcccatgttaaaccatggtgaaacagtgaaggctaacacatcattaattacatagatcaatgaattaattgccatggctaagtttgcatcaccttgagcataagttacgcccaaaagaatcaactggaagacgccactagcagtccaccaaaagtattgattgttgtaacgcataaagcacatgatcccagcagttaatgaaatagcaaaactaatagcatcaatccaaggacgaggatcattggtaaatttaccaatcaaaaagccggatacaacataaacaagtaaagtaccaacaatagcaacaagccattcctttgaaccgaattttcttaagtgattcttagtgtcatcattccatgatctaacagcaataataactggtaaatctaaagttgcaatataagcaatctgttcaaaaatggaaagataattcttagctgaccaacctgcatagataaaacaagcagctgaaatcaaccccaaccaaccattaattgctttagtagcgttaattgccaatacacaaagtgtacccaaaagcgtaccaataaaagtaatcaaagttacgcttgtaattttgccttgaatcagcaaagctaattgaaatccaaacgcaaaaaaccataaacagtaattttgaactggccagcctttcaattgattaaatagccaaacaaaataattttcgtgttttctttccattgtactgagacgtaaaaagtagacaattaaaatattggattaatagaggcttgacttcgatactctttcggggttaagccttttaatctgctctttatcctttcgttgttatagtattcgatatattcctcgattgcttgagttaattcttgaagattatgatacttgtattcttgatcatagaacatttcagttttgagcaggccaaagaagttctccattagcccatcatccatggagttgccctttctggacatgctttgagtaataccatggagttttaaagctcgctgataacgagggctttgatactgacagccctgatcagtatgaaaaatgcagttattaagagctgtttctttggcaaaagccttgtcaagcattgtcattactaaatccatatctggatgtttggagatagtataagaaactatatcgccaccgcagccgtctagaataggcgataagtaaagcttttcattattaagatgaaattcagtgatatcagtataccattttgtgttaggcagggctgcgaagaaatcacgatgaattaaatttggagctattttgccaatagtacctttatagcttgaatatttgcgcttattgcgcctgatgcctttaagacctaatttatgcatccaatagcgaacggttttctccgtaactttccagccctctctgattaactgcaaagctactctgcgatatccatagcggccttgatgatgattaaaaatctcatggattctagcaataagctttgaccgtttaggcttggcgggctgtcgtttgataatcttgtagtatgagcttctggcaattataggtagctcagggtgctctgcaatcgcagctaatacataatttaaactaactttgaattcttgccttagatccgtaatcaccctagctatttcttctgatcttcttggtccaaggcacttagtttttttacgtattcgttcacaatacgcaatcgcaagttttcttctttcagctgctggatctctttctccagttccttgcgagatttctgcttttctttggtcacgggcagggcgtcctttctgtttgataatgacattatacccgtttttcttatattctctaatccaattgttaagcatgccaatacttttaaaccccagttccaaagacagctgtaagtatggtttattgccaaagattgcttgttcaatagttcgctgcttaaactctttggaatagctttggtttttagtagttaaaatttctattccatgcatatcaattaatctaagcatatagtctaaattagctagattcattctgtacgctttagccaattgactgattgagatattttcatctttccatttatgataaatttctattttttgttctttattaaatttagacatagtaaacattctaagctaaatagtgaattagttatccgacgggataattgattcactatttttattcttttgtagaattaaagtagtggtaaaacgatatgccctgaggtctttagacacttgatgtcgcataataaactggcagttttacttaagttttcaatagtctcttcgaagaatgtggacactagatgtcgagtttagaaaattagatctgatttcttaagtaaatacgttttactactaagttttggaggtttttattatgcaagttacttttggaattgatgtaagcaagtctacttctactgtttgtgaactaattggtgaaagcaaaaatgaactaaccattactaataatcgtcctggttttattcaattgcttcatgaattaaccgctttttctaaacatccgcaaattatttttgaagctaccggtgtttattcacgcagactgcaggcttttcttgaagactacggctatgaatatgttgttattaatccgcttaaagccaaaaaagagatgaatatggggctacgctacaacaagaccgataaaactgatgcttatcatttagctttaattcaaagactttatcgccatccggttaatcaaagcgaatcccaaacttataagcagcttaatgctttgagccgcttctatgaccagctgacaagtgacttggtaatagctaaaaatcgacttcaccaagctctacaatcgacttttcctgaaattgaaaatttattttcttctgctagaggtaaaaattactggcaaatagttgtgcgatatcctcattgtgacttagtaagaagagaagataaaaaacagcttattaactggttaatgagcttaaaggggattgcttttaaacacgctctaaggactgcagataaattaattgaattagcttatcaagcttatcaagttgtatcttgctctagcatagaagtcgagcaagtgcagtattatgcacacagattgcttaatttaagtgatcaaagagaaaatttaatcgcaagaatggttaagttagcgaagtctttgcctaatcatgatttagaaaacctagaaagcattccaggctttgcacagaccactgctgtcagagttttagcagagttaggagatttacgcagatttagtaatcctaataaaatcaatgcttttatcggaattgatccaggcagatatcagtcaggagaaatggactctaatttaagtattactaaacatggcaatgcagtcgcacgtaagttgctttatcgagctattggacaaattgataatgcagctaagacaaatccgtgtcatatagcagattattatgaaagcaaaaagctatcctctcaaaccaaagggttcaaaaagatagctattgcttcaattcataaactaatcagaaccatttatgccctgattatcaatgatcaaccatatgattacaacgtagccacacataatcaaaaagactttagtcgtaattaattgatcaagtacattataacgctaagcccaaaaatcagatatggatctgggcttatttgtcgtgtctaactaaaaaaataaatcgacactaaaagatgtttaagttgaaatttaaacaaaaaatgaagccaaacttcttattatgcttgactttacgtagaaaaagacctaaaagtgtctaacttttaggtctcagttcacatcctattcaacatttcccttttttattttaggttgcaaaatacaagatcttgtgccttatccgtgctatgtaaaaaaaacatcgatatctagtatagtggaccattaattaaatacaagaattgacatttttaatttttgcgttaataacatatttctatttccgtttatcaagcaaacatttattaattttttctaaacagcaaaaaaattttgttccttttagtgacacagtgtcatatgatatatacgtgattattaatttatatttttatggaggtacactcatgtttaaaactaagaaaacgcaatttgctatccgaaaattagcacaaggcgcctcagcagttttactttgcttcggcatattgggcggagcaagtgcacctatcgttccagctgcaactacagatgacccaacaaaaacagtcactgaaagtacaattaatagtgagaatacttctttcaatattgaaaccaccaccaatgcatctgataaattcgcttccatcagcaaaaatggggggggtacaacggtagtgccaaattctgctgagccagtttctccggatcagtccattacagaaaatgataatcagcaagaaaaaactactgtagagaattctactgagatatctgagcctgtcaaagacatcaataagtttgataatgatgccaatgttgataaagacgaaacaatcactgtaaaaaagccaacaattaatgtcgacactgaaaaggtagaacaaggcgatgaaacagagaaaagtaaactcgaagaaattaaaaagtatattgaggacgtagccgcaaaacatccattaggcattgccggaattttccacctttttggtaacgaaatagatggatctgctcatattgcaggaaatgtcgcaacagacaaattaagtgctggcaacttcggtactatccaagatgccactagtaacttgactacttgtgatattcattacatcggcagtattgatcatttgaatcagattgatggcgaaaataaactagttatttttggtccagatgttgaatataaatcatacgaaaatggtagttccattcaggtaaaaataaatggaaattggcaaaaagtaggaattccatacaacaaaactatcagagctgaccaaattctagatattcaaggcgaactagataaattaagcgataaatcagacgaatgggctaagcaaacgcaaaccgaaggcgtaattgctgatttcaaggagggtaaatagttggatcgacgtttctaatgctatcaaggatggcagcaaagatcctatttatgtaactattgatgcaaaatacctttcaggcaataacaagcatgaaattgctattaaaggcatccctgcagacgcagaaacaccaatcatcatcctaaatgtaactaatgttcaaaatggcgatttaaccgttagcacaagacttgttttggattattcagaccaaactagcatcaatggcgtaagtgaaaaaccatctcaacttaataagttattatggaattttggaacagatgttaaaaatttaactattgaaggagacttccatttaggtagtattttagctactaacgcacatattaccgctaacaaaaatgttgacggtaatatcattggtaacaaaatcactattaaaggtgaaactcaccgttgggacctaactccgccattagtagaagttgaaactccgccggaggatccaaaagatccacctaaagaccccgaaaagccagagaatccacctaaggatcctgaacctactcctgagcctgaaccggaactaaagcctgagcctactcctgatcctgaagaagagagtactcccccattaccagaagaagtaattcctccaactgataatgaaaattcctctgacttcaaggaagaggacactgctcctctaccagaatctgttgtagaaaaacaagttaaaaagaatcttccatccccttcaactactgaagaaaatattgcacctcatgctgcgactatcccaacctcaactataactgaaaaagaaacagttttacctcaaaccggtgaaagccaagacaagctaatgacgattggactcatcactactagcgttgcttcattgtttgcagtattaggcacagtaatcaaaaaaagaaattaattaaaaatgattcaattcaagccatttttattcttaaaataatctagaattaagtgaggattaaaccatgttaaaaaatagactaaaaatattccaacaaattcttcctactaaggcaactaacactccaaaataccaattgcctatcaactattacgatcctgaaggcagcatggttggcacttattctggaattaacttggcggcaaatgaaactatcactcaccaccagctcaaaagatttatcaacatccatcttcccgaaaactacgaagtttttccttactttgcttatcctaaggagaatatcacctgtgaaaatctgcctgatgaaataatgatcacaatcagattatctaattaaaaaaggcgactcgattgagtcgcttttttcattgcaattgatattaatgttgcgaagcaccagttgtagtatctggttcttcgtgcttttcttctttaacttctgcagccttagttgaagcaccagttgcggcgtctggatcagaatttctacggtaagttgcaccagtagttgcatcatcatctactaccaatttttgaccagtagtctcacagaagtacttaactaatggatataagtctttgacccattcataaataccagcatagttaccttggtcgtcttctacacgcttataatagtccacaaccaacttcttcaaattgcctgttggtattggcatataaacaacatcatgacctgcttccttagtccgcaaagcatgaacaacttttttaacattcggaataacgtcacgaacatctgggtgaactgcgcgcatcgtatcacccacttgatctggcgtagctagcattttcttgttaggatcagttggacggttataccacaagaattggttattatcatcaacaaatgtcattttaccaatggtatttctcagcatccaattaagttggttaacagttaacagacctgcatcaagtttgacataatcgtcaccctccgcagcatgaacttttttagctgctttatctagccaatcaggatcatttttatcgattccctcaactgtatacttagacttaccctttgcatcgaaatcttcttttaagtattcatcggcattcatatctttaagccattttggttcagccatagtaagaccccctcgtatgaactttgttaatctaattatataatgtaagtggtttcaattcaacaattttaatatattttatataatatttttactagctggattatatattattttacgcgtggtgctagttaaatctttctagacaataagccaaattataagctaaaattgcaatttccaaccggctttgaaagcctatcagactacgtgctcgattgttctcggcattgtaataggtcagaagcgaaaagtcgctttcaattgttctgcgaatagccatcaattgatgatcattgtgctttttagctcctgtcatatttttacgatatggtgtccaaagttcataacccatttgttttagctgttgatgcagttctttgcctaaatagccttcgtcgccaagaagatagtaattagatggatgggtattttccagcagttcaactgtctccctggcatcatgaactgatgcttttgttacgacataatcaagaatgtaaccgtcatcgctaacaatgacatgaactttgaaaccatagaagtaaattttcttggtggccttataaccaatgttggcataaccgcgaaaaattttagcacgatagttgcgaattggttggcaaacaggtaccggaaagctgtcaatgatcaagaaatgtccattcaggtcaacctttttattcatttcttgccgtatctgataaatcaattgcaatagctgacgtgaacgccgattaaaacgtgagtgtgataaacaattgaaacattcacagaatcttctttgtgattcaattcctgtcttagcttgccagataagtaaagccaaaatcagactgtccgtagttttaatttgatcaatatttcgccgatgagtaaactcagccggtgcatacaaacgataccagtgccgacaaattatcactaaatctttaaaactaacttgtaaatggtggctaaaacgcttaagcttaaggcagttcaatcagatcagactcttttctattattactatttacaagtcgagtctaacaagattggacttttttattaactaaaacgatttaactagcaccctgcgtattattttatataaaaaaagctgatcaacgagcaactctttacatctttgtctcaattgtatgagtgtccaaatgaatgatcacgtcaaacatcgctttttcttctggtgaaatcttatgagccacctcaataacagcaatacgtggattcttcaacagcgtcttatgaatgcctaacgacaagttcgggtcaagcgcacttgtcgcttcatcagccagcaaaatcggccgatctgataaaagcgcgcgagcaatttctactctttgaatttgtccacccgacaagccactgccgttttcacctacagccttgtctagaccctgttcctttaccaattcatctagaccagcctcatgaataacttctttcaaatgctcgtcactcactttacgtcctaacgtaatgttgaaacgcaacgtatcatcaaacatgaatggcttttggttaacataggaaaaataattatgggcagcatcccaatttcccgttacatccgtaccattgatcaaaattttaccgtctttgggctttctcaaacctaatagcaagcgaagcaaggtggtcttgccccaaccacttggcgccatcaatagaactttttcacccggcttaactgttaagttcacattctcaaagatgcgtttgtgatcactacctgtaacataagataattgttcaacctccataccatcaaaatgatcgatcttctgcttatcatctttcagcacgtgatgcaaagcgcgctgggtcttttcccacattggcacagtcgacttgacttggttaaattcgttaaaaagagtcacgattggcgtgataaagttcaaggccaaatcgaccatcattactaatgtacccacctttaaatttccctgcagcatcataataccgccaatagtacatggtacgatgaagcaaaacaattcagcagctgaataaattaattctagtgcccaagcttgagtcaacgtcatattacgcagagcgttctccattgcctgggccgcaccagctgctcgtgtaacgatgttggtgcgcacgttataaagcttggtagcctgtgccccatttaatgaatcggacacattttgcgtatagttagcgttagtcgttgcccaaatcttggacttacgtgtaatgataggactagtaatcatttgaactaatgctggcgcaagcgtagcaatcaaaaatactagggtcatctgccatgaactataaaaagcaaaagtaattgccccgaaaaacgacaaaccttggaaaatcatatccaattgtgccgttatccgattagtttcaatctgttttaaatcgttggtcatcagtgataaaccgctcttgatatcaggctcaccttgatcaaccaaataacgcaagttagtgcgcttaaaggtcatattcacgtcacgaataatgcccatctttaccgtttcatagacaaagttactggccataaaacacatctgacctaaggcagtcaaagcagccaggcgaatcaaatgcagataatcatgcgatcctgacgaagcaacattcaacataatttgtaccatataagctacaaagacgatgttgcaggccttgattgcggccaaaatggtatagctaataatttggctttttttagcgtacttcaggctcattaatttctccttttctatcccgttagaaacattatacccgctagcttgtctttttctcaattagatacgataattagagtaatcattttaatttttaatgaaaagcagaaaggaacttttaatgaagactggtactaaaattattactttagacaacggttatcacttatggaccaacacccaaggtgaaggcgacattcatcttctagctttgcatggtggtcctggcggcaatcacgaatattgggaagacactgcagaacaattgaaaaagcaaggcttgaacgtgcaagttactatgtacgatcaactcggttcactttattcagatcagcctgactactctgatcctgaaattgccaagaaatatttaacctacgaatatttcttagatgaggttgacgaagtccgtgaaaagttaggacttgataacatttatttaatcggccaaagctggggtggcctattagttcaagaatacgccgttaaatatggtcaacacttgaaaggtgcaattatctcctcaatggttgatgaaatcgatgagtacgttgcttcagttaacagaagacgccaagaggttttaccacaaaccgaaatcgacttcatgcacgaatgcgaaaagaacaacgactatgataatcaacgctatcaagatgacgtacaaattttaaacattaatttcgttgaccgaaagcaaccatctaagctttaccacttaaaagacattggtggaaccgctgtttacaatgctttccaaggcgacaatgaattcgtaattactggtaaattaaaagactggcatttcagagatcaattacacaagatcaaggtgccaaccctattaacctttggtgaaaacgaaactatgccaatttcaactgctaagattatgcaaaagaagatccctaactcacgcttagtaactacacctgacggtggtcaccaccacatggttgacaaccctgacgtatattataagcacttagctgactttattcgtgaagtagaaaatggtacatttaagggcgaaaattaattaacagatattcaggctggaatcgatttccggccttttatttttaaggaaaatgatatggatgaaaaagatgtcaaaattctgctagttgaggatgaagaaagcgtcgctagcttcgtcaaaactgaattagaatttgaggattaccaagttgtttgggctgaagacggcaaaaaagcattagacctttttactcaagaaaagccaactttaattttgcttgattggatgttgccagtatatgatggcatgaccgtgttacggcgaatccgcaagcaaagtgatgtccctattattatgcttaccgccaaaaattctgcctctgatataagctctgctcttgatcagggactagacgactacctcaccaaaccatttgaaatcgaggaattgctggcacgaattcgggtagtcttgcgaagactggaaaaaatgcggcagcaaaatgacgtccctgatacttccctagaatttggcccattaaaaattgatctgcttaagcacgaattttactgtgacaccgagcaaatttatcttactcctaaggaatttgccttaatcactgaactaatgcgggaccccgaaaaagtcaaaagtcgtgacgagttgcttgatacagtctggggatatgactttgttggtcaaaccaatactgttgatgtttatattcgaactattcgcaacaagataggcaatccctacaaaaagatcattaaaaccatgcgcggcttgggctattgtttgagaaaattagatgataatcatgaaaaaagctgatcctcaaacaactacgcaacaattaacccgtttattcgttaggctatttgtcgctattttaattctggtcaatttggcttttctaattatttcatcggcctatatttattaccaagctgaacggcaaagtgaacaagttgttgaagcagtaaaagaaaatcttgattcaaaatatgactggtcggctatgctggatgcttatttggcaaaacaagacgatgatgccatcattttaaccacccctcaaggcaaaagttattactctgaaaatgctcacgagacctttaaacaaattaatcgccaaaatcattatcaaaacatggtctattccaataagcatatttacttcttacggacggaaaactcgcatgactttaaaatcaaggttgcattaaacattgatcgcttatttcatttaattatttggctatttgggacaatgattgtcatcaacttaatcgctattctgctgagcatcccccttattcgccgttttgcccacaaatggagtcgtccaattcaggtaatgaataatgaaattcaagaaatccagcaaggtgcttcaactgagcaaatcacagtgccgcaacaaccattagagattcgaaaattagcccagtcttttaacaatctgctagcttttcaaaaacaggccttacagcgtgagcaacaattcgtcagtgatgcttcacatgaactcaaaacaccaatcgccgcaattcgaggacacgttaatttaatcagacgccatggtcaagccaaaccagaaatcatccctaagtcactggattatatcgatactgaatcaaaaaagatggaaatattagtcaacgatttactcaccttaggaagaatcgaacgcaatactgaagtcgtcaaaattgatttggtaagaattattaatgaagtagtgtcagaaatacagtcagtttatccacaaaaaatacagactgacatgccacaagtattgaaatatcgtattaattcactagattttcacaacattgtgcacaacttagtggaaaatgcggcaaaatattctcctcaagacagcactattgtagttaaattagctaaaaataaaggacaggtctctttcacagttgcagacaacggaatgggcattgcgccagaaaatcgcgagaagatctttcaacgttttttccgtgaagacacgtcccactccaataaagttaaaggatctggcctagggttagcaattgtcaaagctgaagctgataagtatcatggtcaaattaaagttacggataatagtcctcagggaacaatttttacagtttcttttcctacagaaaaatgaagaaatcttcatttaaactctattaaatcttagttttttaaagctgcttagctagtaagataaatatatcaagttaaagcaaaacaaaaaattatcaatagtttaaaggagaacatattatgaagactattaacttaaagaaaattactattactggcgtagcattactcggcttaggaactgctgcaattaccgcaactaatttagctactgaacctaacgtggttcaagctgcttcaagcaaaattaaggtttcacaaaattcagctgttaaaaagtttaaggcaaaattcaaggcagctaaagtcgaatcaatcagcttagataaagaaaaaggccgttacgtttacgagatcgaaggcttcaattcaacgagagaatacgaaatgaaaattaatgccgcaactggcaaagttatctcatcccactccgaaagacttgatcgagacgagcgtaataaaaaagcattaaatttcagcaaaactatttctcgctcaactgctactaaaattgctcaaaaaagagtatctggcaaggcagttgaatggtcattagatcgtgaaggttcaaagaatgtttgggaagttaccatcagcaagaacggccaaaagagcgaagtaaaaattaacgcaattactaaaaaagtaatcagtgttgaacgggactaattgagaaaagaaggtatagaatagatgaaatttactaaactgacaagtattgcattattaagcgcagctttattaacaggaactgtagcatgttcaaaacaagataattcaactgctaaaactactacccaaaagagtgttacttcatcaaaggttacacataattctgaatcagcaatgagcaaacaaactcaaaaagataatattcaaatcaaattaagccagcaagaagccattgataaattccatcaacaatttagtggcaaacagcttaaaagcattgaattaaatcgtgaaggcaaacattacctttatgaaattgaaggattcgattcaaacaatgaatattctgttaacatcaacgcagaaactggtcaaattggacatgttcattcagaaaagttagatcatgatgatcgaaaccaaaaagctctagatttcaagggcaccattagccgcgacgatgctagtcgtatcgcagaagagcacattaaaggcactagcgaagaatggaaactagagcaagacgaagacactggtaaaacatactgggaagttaaggttaaaaatggtcatcaagaaaccgaagttaaaattaacgctcacaccaaagaagttatttcaactgaacatgatgattaataagattaagaacataaagaaagccgcaacattattctcgaagttgcggctttttattttgtctaatttttggataacttttttaccaataaccaatcagtttgaggatcgctaccaacttggaaagtatgctggctcactttttcaaatccatgacgcttataaaaatattgtgccgaaatgttcttttcataaacgcctaaccacatgtaatctttgccttcttctcgtgctgtcttttctgcaaaatcaaacaaaacattgcccaacccgcgatgttgaaaattagtacgcagataaattcgttccacttctagagcattatcacgtaactgctcagtctgagcatccccaacattgatttttaaataaccagcaatttttcctttaaccattaaaaagtaaaaacgactattaggattttcaatctctctaatcaacttttccgtctgataatcttcctctaaaaagcgtttcatgtcatctggtgcagtataaggatcaaaagtcgttttaaaagtttcacgtgaaactttctgtaattctttcacatccgctgttgtaattgctttaatctcgtacttcatcaatatttcctctttccaccgttcttaaccaggtgccaattttcactggcattcttttctacaatttgtaacaaagcagctaattctgttctctgtttttgatctagtcctgtcaaaactatttcatttgaataagcattttctttttctattcgagcagctaatttatctcctaattctgtcacaaacaaatgcttaatctttttattctgctggtcattttctttcctaatcagctgattttgttccagttttttaatgctacgagctgccgtcgtccgatcaacattaagcatccctgctagatggtcagaaataattcccggattttctttaatgcgggctaaatacaggtactgacctcgattcaattgcatctctttaaattcaatattagcaatcgaatcaagtgctcgcgcaatagtgccaatttgacgcaaaatatcttctttcatgtttttcacctaaaaactattatatttaattttgttgtaattgcaacaataaaatataaaaactaaaaaagggatcgctccctttagttaattcatcaatttttctttagttcatttagatcgactacctgatcagctaactgcttaacttcatctcttaagtggtgagttaccataattacggttttatctttttgcgtcaaaatcaatctttctaattgtacgctagaagctttgtctaaggcagaagtagcttcatctaacagataaattggtgtatcacgcagcaatgcacgtgcaaaagcaacacgctgtttttgcccaccggacaactgtttaccttggtcagctaaaacagtatccatgccatcaggcaacttagcaattagatcctctaatccacattctttgatcacttcagaaatttttgcttttgaaacttggcgtcccaaagttaaattccaccctagagaagcagtaaaaatatatggatcttgctgcaaatatgtaatctgatcatgcaaatccttatctgaaatctggttatattccacatcagaaatttcaattttcccctgataatctctaagtaagccagaaatcaaattcagcagagtcccccatcagaatatatttatttttcagtttaaaatttaaattcaaattctcaaagataggcttatcttgtccagaatactgataagaaactttatccaattctagattgcttagtttaaaatcagcaggcaaagctccatcaacagttttaagcggtatagtcttaaatttttctataattggtttaactgatttgaattcttgccaattaaaactaatcccacttaattcagcgaaaattgtactggcaaaaaattgtgccccactgatggtcccgactggcgttaattgatgcaaaatcaaccagcctgtttgccctaaaatgataacttgactgataaaggctagaccattggtaatcgcctgagttatcccggctgttttactataatttagcgcatgttttttaacatcatcagaagcgccattgatctttttgacgattgtttgcggtaaattggcaagaaataaggtattgaagccattcaacacatcattaattgaattaaccaaacgttcattggcatgggtatattctaatgaccttttggccaaaattttagaaaacaaattgggaaccactcccataataattgtcaaaataatcacagtgaccacaagactgacattgaagtacgccaaagtgagcataccgaaaacaatttcactgatttgtctaatgatcatcatgaaatcctcgacaccaaagttattaatggttgtaatgtcattggtcagccaagaattgtaagtagctaccgtttgttgatgaaagcctgaataactcgtctgtgatagatcttgcgcaatgtcatttctaattaatttatccacattttgtgccaaacgggtttgctcaacattgactagacagttaacaatcgcgtaaaaaatataggcaccgcccattaaggcaacccacatgaaaaaacgctcagcttttaattttgcaactgcacttaaagcattagcgctagatattccggctagtgtcaaaaagcctgcattaatgactattaaaaatgtaacaaataaaaattcccactttaatcttttaaaatattgcagtaattccattgattctccttatattaaaaaataattaaattaataatactatatttatgtatttgttcaatattttttaatactttacttaaattactgcaaaattaaaagagactgtaaaatagtttgtgtaaggatgaatgattccttaaatttatttctttaaacattagaaaaaggagttcctttctcgtatgattggtttgaacaaaaaaacacatacagaaagaagaactccttcatgaatgattttaccaaagattttgctcaagctctattcaatccagacaaaataaatgatttattgcgcaaagagctacaacaggctgttaataacttgttagaagctgaattgactgcctttctgggctatgatccctatgccagaaatggctggaatactggcaactctagaaatggtgcttatttccgcaaagttgatacgcaatttggcccaattgaagtgcaagtgccccgggatcgcaacggtcaatttcatcagcacacgctgcctgactacaagcagcactcggatatcttggaaagcatgattatcaagctttactccaagggcgtgaccaccagggaaatagccgatctaattgaaaagatgtatggcagccattacagtccagctcaggtatcaaatatttccaagcagatgattccaaaggttgaggcttaccacaaacgcaagctaagcgacaagtttttctgcgtctatttggatgcgacataccttcctttgcgccgagaaacatttgagcgtgaagcagtctatattgccattggcatcaagcctaatgggcacaaggaggtcattgactactgcattgcacctagcgagaacattgaagtctggacagatatgcttcaaaacatgaaatcccgaggcttaaagcaagttgagctttttctttctgatggtgttgttggcatgaaaacagccttggccaggacttatcctaaagctcattttcaacgctgtttggttcatgtcatgcgcaatatctgcgctaaagtacgcgtctacgatcgtgaaaagatcatgaacgaattcaaacaggtgcatcaacagacaaacaaagaagaagccacagctgtcctgcatgacttctataccaaatggggcaaggtttacagccatgttatcagaagcttgaaagacatagaaccagatctgctggtcttttataactatcccaagcagatcagagcttcaatttattcgactaacatgattgaatcatttaacaatgtgatcaagcgcaaagctaagcctaaggcagagtttccaactgaacagtcgcttgatgcttttattggcattcaggcaatgagctacaatgaccgttatttcaatcgaattcataaaggctttggtcaggttcaggacaccttagaatcctactttgattaaataaataattaaaaaatcaatttacgagaaagaactatttacacaaaagatttgacagtttcaattaaaagggatcgctcccttttaattagtctacataagcatatttatatgaccattgcgtaccagcagtattatgaatgatgccgtgaactcgcttgttttgcaagtaagctgtggtctgttgataaatcggtgtaatagcctgattactatttacaatcttagctgccgaaatcagatcattccagcgtatgtcaggattattggcgtcttgattgccagcttttttaaccaaattatcgtactcagaatttgaccacttaccgtaattgtaagacgtacctgtcattggaatttgcataaatgtcatcgggtcgttgaagtcgccaccccaatgagagagataaatgtcaaagttgccttgatgtgctcgactggtggttgacttatcaggaatattggtaatatttatcttgattcccttcaattctttggtccattgtgactgcaaatattgggtcaattgatcactgtctgcttcatcatttgaagataaaacatcaaaagtcaaactcttttggccaatctcctgtaatcccttttgccaatatttcttggctagagctggattataatcaactgtatttttcactgcttgttctttagcaaaatctatacctgttttaggatttgcagccaaatcattggcaacaaagccttttggcagagttgagccattgcctaaaacctttttagtcacaatatcacgatcaattgataatgataaagccaagcgaatatttttattattcaaggcctttctattaactgcatttttatccttaaaattataaagcaagaaacgcactaacgaatatggatattgagtaaagtcattattgctcttcaagtttttaacttgctcacttgaaagtggagttaaatccaatttgccctgttgatacaactgataaccagtattgttagacttaactacttgatagtgaatcttgttcaacttgactaccttcttgtcccagtaatcattattcttaacaaatgaccaggtatcattagttccattccatcctttaatcttgaaaggacctgagtagacttggtactgagccttggttgcgtatctattgccatactttttcacaactttttcgttttgcggcccaaatagtggataagccatcaatactctaaagtaagcgatcgggcgatttaacttaaccactaccgtctttttatccggtgcagaaattcctaatgcattaggtgatttctttcctgcaatgattgcgtcagcattcttcacgccactaaaaagataggcatacggagaagcggtcttaggattcaagcttcttttccaagaataaacaaagtcctgcgctacaatcggatcaccattggaccacttagaatcacgtatcttaaacgtccaggtcttaccatctttagatacggtcccagttttagctaagccggctgttggcttaccatttttaccaagacgataaaaactttcgaatacattgccagtttgaccaaatccggtagacttactgatatcaatagtatctagtggagctgtggtgcttaaatttaaagtgccactttgagctgccgacttactactgctattgccattaccacatgctgcaagaagcattcctaatgaaatagtaacgactcctgctaaaactccctttagtttcgacataaattttcctttctcaaacaaaaaaatgggatgtactccaacacggaatacatcccattaagaaccacaactttttaactagttaatcagtaatagtcttaagatgaatcaccacatcagagcatgtcaaataaatgctgtttgtacaacaacattcagtgtattgacattgcatttgacgcttaaacatgtgattcatcatccttcttacttttgataagaataatcataatttattcgatcacgattgtcaacaaaaatctattcccggatttaaaattgaagtgcaacactaagtgttaaacaaaaaggccatgaagacctaaacttgaagtgacgaaaaatcaagaaaggaagatcttcatgaccaattcaaattctagcatttctaagcactatcatcaattaaccagcgtacaacgtggacaaattcaagcaatgctggattccggcataacttcccgtactgttatcgctcaagaagttggctgccataagtcgacaatcagtcgcgaaatcaaacgcggaagcgtcctgcaaagagacagcagctatttattgtatgagcactattacgctgatactgcacagatttattatgagaagcgtcgcaaaaactgctatcagcgcaatccattgaagcattatgctgtctttttgagaatgctctccagacgctttaaagctaaatttgatgccaccagcatcgatgagttcgttggtgaattcaaaaggactatgccaggctacccttgtcccagcacaccaaccgtctatcgctatattgatcagggcttgctggacataagcaatattgatctgcctatgaagctcaaaagacgcaggaacaagcgtcatcacagccatggcggtcacgctttgcacaagaagcatcttggcaattccattgaacagcgtcctaaggaggttgaagacagaaaagctccgctgcactgggaaggagatctggttaaaggcgtcagacgcaagaatcagcctgctttaatgactttgactgaaagaaccacacgctttgaagtagttatcaagattcctgactatcgggcaagcacatgccaaaggctgcttcaaaaggagattgacagacatcctgcctggtttaaatcaatcacgtttgacaatggctctgagtttgcggatatgaccaagatcaagggctgccagatttactttgctcacccatattctccatgggaaaggggcaccaatgagaactgcaatggtcttttgcgtcaattcttccctaagggcaagagcatgaaagacaagtcaaaagcttatgttcaacaggcaactgatgccattaaccacaaatatcgccgaatcctccaatatcacacagcagaggaactcttcaagcaatatatctcttcataacctaactgttgcacttaatttgacaattcaggacaaaaatctattgtataattatagaaaaatatttggagaaatttttatggaaattataaaatatggtccttacactcttttcacacttattagaacaatcctaacatttatcgtggctattgagcatatcggtatctgtttcttagaaatgtttggtaaacctgaacaacaagctaaggcttttgacatggatatcaattttgttaaacaagaagctgctcaagtttcactagctaaccaaggcatctacaatggtatgttaggtgtaattttgatcattgctttctttattttccctatccctattctttttaacgtatggaaattaattctaagtttaattgtcgtagtagcaatttacggcggattcactgcaactaagaaaatctttttagtacaaatgctacccgcacttttagcattaatttttcttttcatttaaaaatattgcatttttgtagcaaaaaacataagaaaattcaaagctcctagtgataagctgtcaccttgtgattatgtaatatataatatcagtaaacatatagaacataataacgaggtggaattcatgagaaaattttttatcattatcagcagcattattactgggttacttattgggataattggggcaacgatctatctaaatagtcaatcgtcaaaggtaagtaactttaccattcgaactactaatttaacagctcaaccgaaaatgatcagctattctagcaataacctgccacagattaatctctcacaggattccgccgttcagaaattcaaatcattatatacacatgcagtaggtcaactaccttagactgaagtctagggtttagtggcttgttagcttgcgctaaccagaacaccaacttgcttagatacggatttgacttaccagcagtaatcttttgactattgccgatagaggtcgtctaattaccaaagccttttaagtccgcgagttgctagcggactgcagcttttctaggctgcttcttttattttaggattctgccacttgcctaatcctttttctaagatgttcacggccgcattccaatcacgaatatgatgcatctgacagatttggcaagtccattcccgatccttaagggttaatttcttataaccgttttggcccataatactgccacattgatggcatctttgggtggtgtacttaggatcaattgttagaaattctttgccatatagatctgccttataagccagcatgttcaggaaactacgccaaccaacatcagaaatagcttgagacaaggcatgattcttaagcagttttttgctccttaattcctcggcaactactaaatcgtggtttttgattaatgcagttgagagaacttgtaagaagtcttcacgctgtctgcgaatcttgtcgtgcagtctggcaactgataagcgctgcttttgatagttttttgctagccgcaaattgcgtccttcttttttagcccggcgctgcctgcgagataatactcgttgagcacgagccagcttctttttggctttgcggtaaaagcgtggattagcgaccattgatccatttgaatccgttaagaaattatcaaggttgagatctattccaagttgactctgcgtcttaggcaaggctttaacaaaggcaatatcgctgcctaactgcattgataagtagaattgctcgtcagcggtcttttttatcgtcactgtcccaattctagttgagatatgattaagcaagcgctctttaatcagttttctaaaaccagcaatgcggacaacgcctagcttaggcaatttaatatgcttagcatcaataaacctagctgtcccgttatcaagaaaagcttctggctgcttaggatattgacagttggtctgatatgaccagtcgctgcgttttttatggaaagttgggattccatgaccaatcttacgatagttgttccaagccttctgataattttgaatggcattggcaagagcgaggctatcaatttctttaacacgcaaaaagctataagtatcgcggatattctttggcttagccaatagttcgctattagtgactacttcttctgccaacctagtctcataattattaagaatagaaaaggcaaaaggcattgcttgatattgtctaacagctaagtagcccttagcatgataattacttcgattacgtcctacataagagttgtagacaaagcgctgcgcatcatagtttagcttaatgattttcttttgcttagaactaggataaaagcgaagcttaacgccaaaatgataggctaaactgctcatttttttcatgtgtttcacctcctcgtattatataaattgtaattagtcatattgtgataattaatcaaattagtatttgctttttgatcttcacatgttagcctctaattgtcattggctttggtcaactggtctaggttatcacctcctgcagttttgtctgctttataagtctgccacccagacagttcctttatgctctaactcacatgctgtattgattgcttctttttgctagtccttgagcaattgggattaggtgcagctttcaaagaagcaaccagtgaatacttatactggcgagattgaacttaagaactgtaattaggggttaacatgtgaagatcaaaatctatgatcagaaatttgaaagaaaggaggccatttccaatgaaattatttgtcggtattgatgttagttctaaagatttacaggtcgttgcacttgattcagaagatcaaaacaaacgcttaattaacgatagctttgtcaatgatctttatggtgctagtgaactgaaaaaacaaattttagatctagctcaaaataaacactatgatcaaatcattattggcatggaagctacatctatttacagttttcatcctgcttactttttccaaaatgacgaagatttacaaaagctcaatgtagagactgatgtaattaaccccaaagaaaccagcaggtttcataaagtctttgaagaaagtaaaactgatcctctcgatgcttattacattgctttgtatctaagctttggacattatcgagtaagcattgccagacaagacaactatcttgctttagagcgtttaacgcgtaccagatatgaattagttcaagaactgactcgtaccaaacagcacttcattgaagctttatattatcgggttaataaactaatcactgtcgataaagataagattaatactcctcttttcggtgctacaatgatgtctattgtaaccgatagtaaaactctggatgagatcgcggatatgcctaccgaagacttaatttcttacttacaggttaaaggcagaggacgcttttccgatccagataccttggctaaagcaattaagaaagctgttagaggttcatatcgcttaggcaaagtaatgactgattcaattgatgcagtgctttctgttcattacaacatgattcaaagctttaatgaatctattaaagatctagaaaaagcaattgatcgtatcgttgatgcattaccagaaagcaaaattctggaatcaattcccggtattggcaaaacctatacagctggtattatcgctgagatcggaagtatcgatcgctttgataaagaagaacagctggctaagtatgccggcctaacctggaatcaatatcaatcgggagatcacagcaacgaacatactccaatggccaggactggaaacagatatctaagatattacttgattgaagctgccaatctagcaagattacatgatcctgttttcaaaaaatattaccaaaagaagtatgatgaagctgtctactcgccgcataaacgtgcttgcacattaactgcaagaaaattagtacgagttatctttaaattgctcaaagatgacaaactgtacaggacaccgaggtcttaatttcaaaaattggtctaaatttaaaagtaaacaaaagtttaacattaaaaaaatcaacctttaccaaggcttagtttcatatactcaaatttatgatcaaaaagaacaaatatcatcgcctttcatttgacttattaccacatgactcatagattagatatttatattttacagggaagtcgaacatatgtctctattttttaataaaaaagctgactgctaggtcagcttggtcctatccatccccacattaaaatacggggattttcgggcgtttttcattaaatcgatcacacttagtttaagtaaagatatctatgtttatgacatagtaggctatgatgaccgtaaagactgtactattcaagttgacgcaactaataacaagattctaggtcagtctacgcaggtgcttgattatgactacgaaaaagatgcgtctttgaacctaaaaaagacaatttcacgccaagaagctaatgaaattgccctaaaagaattcagtggaggaacaccgatttcatgggaattaactgatgacaataatcaatcaatttgggaagttaaaatgatccacggtaaacacaaacataccgtaaaaattaatgctagaacaaaggctgtaatctaaaataatccccaacttatgcacaagttgaggattattttcttatcttttatctaggttgactatctgcacgtgacttgtaatcaccgttttcagtaccaataattagcttttcgccattcttgataaaatcaggaacttgcacaactaagccagtttccatagtagcaggtttaccaccaccagctacagttgcacccttaatctctggttgtgtttccttaacggtcatttcaacagttgatggcaattcaataccgataatcttgttatcatctgtaaagtccatatcaaccataatgttaggcatcaagaacttaacgtcatcacccaattgatcagctgaaacttcatattgatcataagtatcagtatccatgaaagtataagtattaccttcgccgtaaaggtattgagcctttttcttagttacttcaactaaatccactttttcagttggacgcatggtcttgtggacaactgcaccactcttaacgtcacgcaaatccatttgcataacggtattacccttacctggcttatggtggttagcctttaaaactttgatcaatttgccatcttggctaaaaatcataccttttttcaaattaattgcttgtaccattatttcttctccctttaatttaaacttacctttcgactagtttaaacacgctggaggcaaagcaaatttttttatcaacagtaaataaatcgtattcataatacctagtataccaaattagatgtgccgcaggtatatccgatcaatcaaatgtccgtcagtcttatgcaaaatcaggctagcacgttccttggttggcgcaatatattcacgcaagttgaccagattaaccatctgccaggtttcttcagccaattgaattgcatcttccagcggtccattagccattttatagtaaaaattatctggcttatttttatttaatttaagtacttttctaaagcgttgcatgtaccatttttcaatcaaatcttcttcagcgtcaatataaattgaaaaatcgaaaaagtcactagtcacaacttgtccactctcgggcaattgcaatgtattaattccttcaataatcaatacatcaggattttttacatgaccatatttcccaggtactatatcgcttaattcttgagaatatagtggataaacgatatccttctttccacttaaaacgtctcgtaaaaaatcactgagcaaagtcatattgtaactttcaggaaagcctttgcgaggcattaaattacgccgctttaatttctcattagggtaaataaaaccatccgtggtcatcaagtgtacctttaattctggataggttctactgagcaacaattgtaataaacgcgcagtggttgatttgccaaccgcaaccgaacccgaaataccgatgataaacggagctggtgaaaaacttttatgcaaaaatttgatttgtgctttttgcgcattctttttttgttggtaaactaagtgtaagtaactgatcaaactggtatagatctcatgcacgtcggttaggtcaatcacgtctcctaaagacttgatatcagctaattcttctttggtaatattgactttatctaagggagctaatttagcccattcatttctgttaaaactcgtataatttctcatatatcgtatccatattccttctaaaacactaacttattataatagaaagcgctaaaaatatgaaaaaaataatcctattcggcgattccatttttaacggatatcgtaatggtcaaaatacaaacctagtaactaatttatttcaacaggcactaattaattatgcacaggtggaaaacatttctaaaagcggtgctaccacagttgaaggcgtcgattatttggagcaaatttccccagaacatgatctagttgttgttgaatacggcaataacgatgccgcaacagcttggggcattagtccagaaagctacgaaaagaacttggctcaaatccttagtgcagtaggcaaagccattgttgtgggattgtgcaatcccaatccagaaagtgacatttttcaatattatggtgctgaaagactcgatctttttaacaatatcgcccaaaaagtcgcaaaggcacatggtgcacaatttgtggatattttacctgcaatgagaaacttaaaagacaaatcgacatattatcaagccgacgggcaacatttaactgatcaaggaaatgagtttttagttaatcaaatcgtgccagtaatcaaaaaagacttagcctaagccaagtccctcttcatcatcacatgttctacgccgccttcatcaaacggttcgcctacaacttgatagcccaagctatcatagaaaggctttacccgcatttgggcgtgacagtaaactgcatcaatcttattttgccgtaaaaatttatgcacagctgtaatcattttcgatcctagctgttgtccgcgcgcttcttttgacacagcaacgcgtcctagcatccatttaccatcttcttgaaacagacgacaagtcgctaaggcagtcgtctgtttttgattgagtaaataaacctgaacagcaattaggtcctcatcatctaaatctggtagagttatcttctgttcagccacaaaagtcgtgttgcgcaatctttctacgcaatagaattctctagctgtcatttcatcaatctttttaaaagtaaaattatctatcttcatattacttgcctaaccaactattgtttctgccaaaccatttttcattaagtttacgcaattgaccatttttttgcaattttgctaaaccttgattgaccttctgacgcaaagttttgtctcccttacgcatccccacagcgaacaagtccattggcacgcgatcattctgaattaccttgtattcgctacttttagccatgtgagcaatataatagtcggcataaacttcatctaacagaattccttgaattcgtcctgcattcagatccaagaacgaattagaaatcgtatcatataaaactgttttcttagcatgcagcacatcttgtttagtttcataccactgctctgctgttgaaccagtttgcattcctaattcataattcttcatttgtttaaatgaactaatgtcactatcttttttcacaactaaaacctggcgattacgtaaatatggcttgctaaaagctacttttttctgtcgttctggcgtaatgctgtaaccattccagagtaagtctatcgtaccgttacgcagctctgtaacgttcattgaccaatcaatcgtttgaaaagaaaccttaatgccatattgtttaaagactgccttagctaagtcgatgtcataacccgtcaattggccgtttttcttttcaaagcccattggtacaaaactatcgtctaagccaattaccacttgctttttgctggcaatcttattccatgtatcttgagtattagcttctttttgtacgctttggcaaccagttaaacataatgttaaggccaagacgatacctaaaatccattttttcattgcctaatcctcgcttaacggtcgaaccttgagcatctgatccgccacattctctgcaaaattcaagtcgtgggtgataatcagctgggttaaacccgatttttttaagcttaaaatcattttctcaacttccttacgtaaatttggatctagcgcgctagttggctcatcataacaaagaatccgcggtttcatagccaaagctctagcgatagctactcgctgtttctgcccacctgataactcataaggatactgctgttcacggccacttatttgtagacgttttaacaatacacgcgcatcctgctctgcttcagttttactcttttttaataccaaagtaggtgccaaagtgatattttgtaaaacgctcaaattaggaaaaagattataatcttggaaaacaacgccaaccttgcctgaatcataaggtttaccgtcaatcaaaatttcaccagaatcttttgtttccaaaccggcaataattcttagtaaggtggttttccccgctcctgatggacctacaattgtcataatttctccgtctttcaaggtaaaagagatgtcacgcaaaattcggtgaccgttaaattctttgctcaaattttttacttctaacatattctcacctcaactacttgtaataagaaaagtatttttccagctttttcaaaacaaaagcacaaatactgatcaacagtagataaattacacctactaaaactaacggtactagcgttacgtctctggccattgccacattgccggccctaagcaaatcacctaaaccaatgacataaactagcgatgaatcctttaccaagttaattacttcatttccaattgaaggcaaaacaatttttattacctggggaataataatcttggtcatcgtttgccagcggctcaagcgcaaaactttcgctgcttcaaactggccttcatcaatcgattggaagccgccacgaaaaatttccgcaaaataagccgcataattcaaaacaaaagcaaacaaggctgcttgatagcggggaaagacgatatgaataattggtaagccataaaagacaaagatcaattgcaataataagggcgtgccccgcataatccaaacataaaagttaaccaaccagcgtaatggtttaaacttacttttttcacctaatgagaccaaaattcctaatggcgttgctaaaattaacgtccagaaaaaaatacttaacgtcatgcctgctcctgacaaaagagcgggtaaaatttctgcaatatattttaatgacatactctcaccttcatttttctttcctaataaaaaagccctcttaggattaacctaagaggacgactgctcgtgattccacctcatgttcgcacctgctcacgcagaaatgcctcactaggttgatcattttaaaagaaaaaccctcatagccaaacggctacgagggcgaatgtaatcgcggttccacctcatgtttacaaattgctcacgcaacttgcctcaataagttcaataatcaacctttagctataacgggctatcccggattttcctacttttgttcagaagaccaactcacagatgtgattcatactagcaaatatcttatttccaccagcaaagactctctattactttgactagtattactatttctgttctaagttgtttttaatgttgaataaatcttaaatgatctagcaacttttgtcaattatttttcttcataagtatctggatcaacatcaagcaatggactcttttctccagtataaataatatctagcttatacattgcacgagaggtaatagtataaacaagttgagtttcatccaatttatggtaagcagctttagaggcatcccacatgactaccgcatcaaattctagtcccttagccaagtaagaaggcacaactagagtaccatcaactagtcgctgattagcagtcgcaattaaggtcgtgttttcaccttttttagctaattcttcatgcacaaatttagctgcagctaagtctttggtaataacagctgtcgtacgcttattttgttcattattatgcaaaacgttaactaaaacatcaattgcttcatcatcgttttttctgccccaaattataggcttaggacctttacggttaaaggcttcaatcttttcgccttgacgcaaaatttgcttggtgaaattggtcaattccttagttgaacgatatgatttcgttaattgcaccacatcagttttttcaggatcaaataagccagagatctgcttaagtaagctacgactttcatccttagtaaaaatagcctgattcaagtcacccaacattgtaaacttggcccgtgggaaattatacttcaagtaagctaattgaaatggagtataatcttgaatttcgtcaatgaaggcataacgcatctcaaagtcagtcctgcgaccagtgatcatgtcatacaaatataagtaagctgaaacatcattcatggcaatatggtgctgcttaaagttattcttaacttcttccacatgagccaaccaatcattttcatcaatattccacttagatagatcaaccatcttaggtacagctcgcaaaaagctcaggtattgtgctcgcatattcaaaaagtggttgtgcaaaatacgcttatgcacgcccttcaaggctgataatacaatttttctacctaaaaaggcctcttccttagcctcagactcaaattcttgatcaggtcgatcatataactcatttaattcagattggctcattccttcaatagcgtgtgccacccaagccttcttagtttctggcgtaatctttcgattcaacatcttgatcaattcttcacgcgttgcatcaattcggttggccaacttgtaattttcattgaaagaataatagatctccttaattttttccttatcaaagtaaggtttcttcttatcacggaaataaatattcttaaaaataacaccgcgcttattcaagtgctctgcataacgagtcaacaagttaaagaaattaactgaatccttaaacttagaaatattgctgtctgcggtttgatcttcaaactgtctgaataagttttcaacttccatacctggcaaccgtcgcgcaacaaactgccagtaagtcatttgaaccatattttgttcgcccatttcaggcaaaacattcttaatatagtcattaaacaactggttaggactgaacatgattacatcacttgaagtcaggttgccacgataacgataaagcaaaaaggctatccgctgcaaaatcgcactggttttaccagaacctgccgcaccctggacaaaaagcagatctgctttggtgtttcgaataatcttattttgttcgcgttgaatcgtcgttacgattgacttcatctgcgttgatgatttttctgacaaaacttccaagagcatttgatcaccgattgactcatcagtgtcaaacatgttcacaatcttgccatcttcaatcataaattggcgtttcttagtcatatcaactgtaatttcaccttcaggcgaattgtaagaaactttacccaatttaccatcataataaattgaagatattggtgcccgccagtcatagatcaagaagtgatcgtccttgtctgcaaaagaacctagaccaatataaatcgtctctgttaggtcctcatttttttctttaaaatcaacccgagcaaaatatggtcgcttctctaaacgctctacagtctctagctgcttagctgaatgttgccaagcatgttcacgttcactcaataattgttgctgctggtggattgacagtgctgtttccattgaagtggaataaccatcataatccaatttaacatcgtcaaaaaagtgtgaattaagctctcttgcttcgccttcagctgatttgatagatttttttaaagttttttcgcggtccttgatctgacccataatattatcaaggtgcttttgttcaagttctttttcgtttttttcagttttggctgtagccatctaatcaccttttctttaaaaattcgcatactattttaccatgaatagcgctttcataatagttttcctgctcgtgagaaaaatataaataaaaattgatgaaaactttaactttagagactataatcttgacatattggggtgatatatacatgaaaagatttttaaaattactgagaaatgttctcttgcttgctcttatcgctcttggcgtttggacttatcagaacaatcccaatattcgtatcgcaacgcaagactccctagctacacttagctatcgaattaacgaacttctaactaacgaaacgaccatttctcccaataacgaaaaaaagactactaatatcaaaactgacacagataaaacagaaaatgacaattcttcagacaatcgtgtatggtcaaatcctgaagctaaggtttatatcgatattagcaataatgctcaactaagatcagctgcagtcaatgcaatgaacgcttggaatcgtaccggtgctttcacttttcaccaaataaatgataaaaaagacgctcaaatcgtcattaatacagtcgataatagctacaccaatgccgcaggagaaacagcaactacctataaccctgctacgggacatttgttaaaggccacggtcaacttgaaccgttactatttgcaaaacgaatggtatggttacagttacaatcgaatcgttaatactgctgaacacgaattaggccacgcaattggcttaaaccacactaataatgtctcagtcatgtacccaaagggttcgatctatacgattcaaccgcaagatattaaaactgttaaaaatatctaccacgaaaataattaactttaaaagctcacctcttttttctacaataaaaggtgagctttttacgaggagaaaaatatgaaaagaatttatatcgtccgtcacggtcaaacttatatcaatcgctacaataagatgcaaggttggtgtgacacaccattaactacaccaggaattgaaggcgctgaagaagctggtaaagctttaagcgaagtaccttttgacattgcattgtctagtgatcttaagagagcaagtgatacctgtgagatcatcatgaaatataacgccaacaaagacgaattgcagcacatcgctagtccatttttcagagaacaattctacggctacttcgaaggaatggattccgaaatggcttggcgaatgattggtggcagtcacggctacggaacacggcaagaaatgtttgctcatgagagcatcgatactattaaggattggattaaagaagccgatccttatcaccaagcagaaaacgctgaagaatattgggctcgtcttgatgatggttttaaattaatcagtcaattggatggcgctgaaaacattctgctagttactcacggcttcactattagaagtctctggtatcgttatggtgaccatattcctttggttccaggtcctaagaatgcttcaatcactattatgacaatgagtgaaaaaggcgaaattaagatacctaagtggaatttaatgcatttatagcaaaataagattaggcgaatcgggcctaatcttattttgtttaattatttttgcaaaacaatatttttatatagcttcactgttattaaaaaacttcctactatttttaacagtaggaagtcttactctaactaatctttagtcacttgttttagtttttattaacttgcagtcgcccaaagtctgaatcaattgtttgccatctttttggtggaaaacagcgttttgatacgacaatcgttctttctttttactcttatctttatactttttaataaaggttacttcatagttaatccgactataattacgcttacctggtaaaacagagagcaccttgatctttacacttaatttcttgatactcttctttttatgccattcctttagttgcttagcaatcttcttatagtctgcattttcttttccattttcaaagtcatctgcatttggcgacttaagggtgttgtacaatagcttagctgcatcccccaccttaatcaagccaggccaaatcgggttaacaatatagtcaccttctgcatcctgatagacatctttttcgccattgccttgatattcagcagtaccatcataatcagtgacgtcatcctcactattagaaaattctgaactaatcgattgcgacaaatccgttaccctttcggacttaatagtttgaccatctgccttactcttaatatagatttccattcgcttagcaatcggataatccttgaaagtatagctaccatgctggttcaatttacccgccttacgatcattgatatagatcgtaccattaggaacgctgcgcacttggaaagtggccgttttgatcttcatatcaacagtcttatctgaccaaatgttaacaatcgaatcagcatctaaatggcgaccattaaccttagatttaactaatatatgatagcgaccaggaaagaccatacctaaatcttgatagtaattctgattgccaccttccatttcaccataatccttttggttaaccgtcaaagttgaattagcgtgattggtcttcacctgtgggcgatatacttgtatccacaacttatattttggaaaaagcaaaaaattgcgtccatcttgaatcagtctgatttcaccatgatcgcgattatgacgcaaattataggctaaacgtttagctgcactgtgatgctctttaaagtaattttgaagcggcttcagcgatttatctgtcacatccatatcaggcgttgaagccgtgacatactgagccagctcagttttaggatcctgcattttagctacaatgcggtcaatttgacgttctttagtgtaataaaaattgccaattagccatgcaataccaattaacaggataataactcccgatatccaaattttcttatgttttttcattgatcaaaacaccttttcacaaatccttttaacttagattaacaagttgatcaaaaaaagcaaacatcttttgttcacaaatcaagacgaagttcttattatatttagtagcattattttattttggaggggattgcacagtggaagtaaattttgattttgtaaaaaatagcagcttcaaggaagcctttcctaccgctgaaaaaatccacaaattatacacaattgatgattatcgtgacgttatttcaaattcacgtcttctattagagagtctaatcaaaaaaatttttaagttagaaaatctcagtccatattacacagttcatgatggcgaacaccgtaatttgcgtaataatacacattatttacgcaatgaactagattaccctctttcgatcatggatttatttgacgaaatacgccacattggcaacgctgctgtccacgataaccaaattgaaccagatcaaaagcaagcctggcactgtatttgtgatttacacgatattcttgtctttttaattaacagctatgacggtcaagacctatattatttgcgtcccgatattgcgatggaagcacaaactgatgaagaccattattatgtgcgccaaaataagcaaccaaaaataatgaaattgcatgatcatcaaaatactaagaaaaaacagtccgcatctgcaccaaaaaaggcgaaacatgttaaacatttttccagtaaacagcatatagagcaaactaactctgcgtcacaaacgaaaactactccttctactaaagacaattgtttaagaaaaattaaagaactctttcaccatgattagttatattgacactatgtcacaatatgataaactatatattatataatttacataccgagaagcgcctatgacgctgccgatacgcaaatgaaaactgaacaagtttctcaaatggggaacggcttatgctagtaggtcgttttccattatttttttacgaaaggagtggttagtccgctatggataatcacaggcaaaaaccttgggctgtcgaacagtctgaggtattaacaaatacaaaaacaaccgaaactggtttaactgaagacgaagttcgaatacgccagcaagctggtttaaacgagctcgcagctaaacctcctaaaacagtaatccaaatggtcaaagagcagatttttgatccaatgatcggtatcttattagtagctgccctcttatctgctatgtttggcgaatataccgaagccattattatcgcgacaatcgtggttcttaataccattattggagtagttcaggaaaaaaaggcacagtcttctttagctgcgttacgtgacatatctgcgccaactgcccatgtaattcgtaatggcaaagaattaatcataccggccaaggaattagtagttggtgatattgttaccttgcatgatggggacatggttccagccgatttgcgcttaattgaaacagctaacttgaaaattcaagaagcatcccttactggtgaatcagtaccggtagaaaaagacgcagctgctgttttaaatccagattgtgctcttggtgaccgcatcaatatggctttttcttcctcaattgtgacttatggtcgtggtcaaggcgtcgtgacagcaattgggatgcaaacagaaatgggtgccattgctggcatgttagaagatccaactgaagtacaaacaccattgaaacgcaaattagctaaagctggcatggtcttaacgactatcggcttaattatttgtagtttggtctttgcaattggtgctttctatggccgtccacttttaccacaattcttggttgctatctcattggcaatttcaattattccagaaggtctgccagcaaccgcaacaattgttatggccttaggcgttaaacgcatggttaagcgtaacgctttgatcaaaaagctgccagcagtcgaaaccttaggtaacgccactgtcatctgttccgacaaaactggtactttaaccttaaacaaaatgactgttacacaggcagcaacaaatgacttcagccaaagtcacatagttgaccagcttgcagcaaataaaaccaatcaaactttggcctatgctagcgctctttgtaacgatgccagcttgaacggtgaaaaagaaattggtgatccaactgaggtagccttaattctttttgcccaaaagcttggctttaaccaatctaacttaaagaaagaattcccccgtttgttcgaacaaccctttgattcggacagaaaacggatgacaacattgcacaaaattgacggtcaattaacggtcttcactaagggtgcaacggacgaaatgttgccgttatgtacacacattatgactaacaatggcgtgcgtaaaattacaccccaagacaaaaagcaaattgcccacttgtctcaccaaatgcaagctggcgctttacgagtactaggctttgctaccaaaatagtggataacttacctgaagcaaatgctgatttggaaaataatttgacttttatcgggattgtcggcatgattgactcaccacgaaaagaagttgcagcatcagttaaaacctgccgtgaagccggtattcgcacaattatgattaccggtgatcacaaggtaactgccttggcaattgcgaaaaagttaaacatttatcagccaggtgacttagcaatctcgggaactgaattagaccaaatgtctgatgcagaattagatcaagctgttgaaaaggctaccgtttttgctcgcgtttctcctgctgacaaactgcgcatcattcaaagcttaaagcgaaatggtgaagtaacagctatgaccggtgacggagtaaacgattcacctgccttaaaggctgccgatatcggtgtcgctatgggtgtaacgggtacagacgtggctgatatgattttgcttgatgatagttttaccacaattgcgcacgctatcaaggaaggtcgccgcgtttaccgcaatatccaaaaagtaattcagttcttgctagtcggcaacattgctgaaattaccactttgtttgcggcaactatttttaactgggatgcgccattattggcagtacacatcttgtgggttaacttagctacagctactctacctgcccttgctcttggcgtagacccagcaagtaaaaacattatgaaacacaagccagttaaagctggtactttattcgaaaaagacctagttattcgggttattacccaaggaatatttgttgccctgcttactttaactggttacttcattggtaaagaaatcggcaatcaagttgtcgggcaaaccatggccttcagtattttagcattggcccaaatgattcgttcatttaatcagcattcaaatactgatcccatctggaaaagatcagctggcaataatccatggttaacagtgtcattcattatctctgcatttttcatgggtattattctctttgtcccagcaatgcaagatgcatttcacattaccagtttgtcagctggacaatggttaatcgtaattgccctagctttactttcaattgcacaagttgagttagtaaaaggttgggcaaagtttagaaatatttttattaatgacaataatttaattgaagattaattagttacaaaaagacggtagcattacaacgctatcgtcttttttgatattaaactttggctgctgccaattggtcaacatctatctgactacgaccaatctgaattgccttttcggtactttcattcaagctagcattgatcatcttatgactaagctccagcaccattggcaaattaacaccgctaactacccgtattcgctcaggatacatatcttcatattccgaagcgactaagtggggtgtcccattttttaaatcagttagcaccaaaatctgactattttgatatttattcatgactttagcaaaacgagccttaaaatctctgattcctgtgtcgtttaattcaattgtcaggatctgatcattcttgcctaccaacatatcatgtgcagacattagccccgcagccaacccttcatgagttgcaattaaaagttccataaaacgcacctctttgtaagcgatttctatagaaccattttaacatatttttgtattaattaagctgttcaatatctgctaataagctactttgttcaggtgttagccgctcatccttttgccgtaacttaagtacttgtagacaagtgtgcaaaatcttttttccttgttccgtcacttgtttgccatccatatcaggcgttacactggctaaaaagtcatccatctcatcagcagtaaccttgaaaacatcattttctccatgaatcaagggcatccgattgagcatttcttcaatcatttgtaatttatttctagcttcttcaaaatctatcttgttcacatccaattctttttcttttattatacaaaaaaacagccacctaagtgactgtcatctttatttcgtattaataattgcgtttgaaattgtagttgcattagattcgatcagttgatgtgaattattaataaaaagggaagccccaattcctatagcagcaaatacaagccaaactttctgtaaaactgtactcttcatgttcccagctccttatatttcttattacttaaacttcccacacgcagaatcgctccttttattgtgattctgcgttttttaacaaatataaaaggcacatgaccttttcattgctataattaaagtgaccaaacgataattctatgcatgaaaggcttgtgccaatgtctattttaccatctcctgaccaaaaaaatgaacaactattttcaaactcaatcatcagcttcatcaagaagtttcaggtgatcaagctgttgagaaaatgtggcttccgcaaggaaaaaggcattagcctgttcagcttgtttctttacgttttaagcaatgtctttcgtgaccgcagcttatatatgcagctgaaaacggatcattttaaagaaagcttttctaaaaattcttattaccgatttatgcgcaacgtccacgtcaattggctccacttcaccacactgctttctgcgcaaatcattaataatcacttgcgatctttgacttcagaaaaacgggctgattgctttgttgtcgatgattcctacttctctaggaccggcttcaagaaaacagaattagtcgccaaagtttttgaccatgtatcaatgacttacaagaaaggttttcgcatgatgaccctgggctggactgatggagcttctttcatgccaatcaattcggtgttgctgtcctctcacaagctacagaatatgattggcgaaaacaaagtctgtgatcagcgcaccattgctggcaaaagacgcatgcttgcccggactaaaggcacagacgtgatggttaatttaatcgaccaagctatgaaagcaggtcatcaagccaagtacgtgctgtttgacagctggttctcaaatccacatcaaatcgtccagctcaagcaaaggaagctggatgtaattgccatggttaaagttagctccaaaatcaaatatgaatttgaaggagaacgcaaaaacatcaaacagatttatcgtagctgtaaaaagcgacgcgggcgttcgcgctatctgttgtcaattccagtcaaggttggccgccaagacaaagacggtgctaaaattgacgctcggataatttgcgttagaaaccgtgccaatcgtaaagagtggctggctattatttgtaccgacatgtcgcttagcgaagatgaagtcattcgcaattatggcaaacgctgggatattgaagtttttttcaaaacctgcaaaagctacctaaaactaagcacggaatatcatggtctgtcctacgatgccttgactgctcatgtggctatagtctttacccgctatatgctcatgtcagtagccaagcgggacgacgaagatgagcgaaccttaggtgagcttttctattgcatgattgatgagctggcggatattacattcagtcattcacttcagctaatcacaaaagcaatggtggctagcgttgaaaaagtctttcatgccagtgaagcacaaatagcagaattcacggctgactttatcaatcgtttacccaaatacatgcaaaaattgttaaagaaaactagcaaaaatagtatagaagcccaaagctaagcaatatcaaagaattgccagcttatttgatgtgggaagtttaagttattatataaaaagccgatcgttatggggatggctacgcttacaattaacataattgtaatattatttacctttacttaagagttacttctccagcaacatttgtatcaaaaaagtcagcaatttgatggacgtccatcccttgccctaaagcccacattaatttggtaatcgcactctcagaagtcatatcacaagcagaaatagctccttccagtaaagcctcacgccccacctcatatttggtcaaatcgctacgttcatacaagcattgactgctggctacaacgggaataccttgacgaattagcttaccaattgcggctaccatgttgcggcgaataaagttcatcccgcctagaccatatgcttcaataacaattccacggcaaccactattaaccatcgcaaaaagcagattaggatcaaagcctggaaatagtttcaccaacgatacgtgtgaattaattttggtattcaaggttggctgaccgtcatgttctctttgaaaatgttctgaattaaaaactaatccatcggaagaaacggttgctactggtggcacattcacactttcaaaagcatcaaagttggtagtccgcacctttacactgcggcagcccagcataactttattatgaaaggctaaataaacatcaggtggacaagttgctgcagctgcaaaagccaaccgtaggttatcgtgagcgtcacttaggaccacgttaattggtacctgacttcccgtcagcacaaccgggatattaatatttttcagcataaacgacaacattgatgccgtataagccatagtatcagtaccgtgtgaaacaacaattccatcgtaatcattgcggtatttgtagatattttctgcaataaatttccattcttctggttggatattagaagaatctaattgcaaaatatcgcggacttgaatgtcgtacggcaactttcccaacattttaattaactcttcaccggtttccttgggtactaggcctgcatcagaagcaacggaagcaatagttcccccagttgatagcaataatattttcttcatcttgttcccctttatctcaaatcacaatgtcgaccataactattcatgattagatcaattaaaacataggccgaactaaaagttaccgcattttgcttactaaattgaaatggcgtagttttgaagaaaaagctatagtcgctaagagaggctaattttcccgtttgccagctagtcagtgacaccaatttcagttcagtattcacgacatcaatcttcttaagttcttcaataattgttttattaaaaccaccaaatgaaataacaaacagcatgtcattttcccgtgcagaccgccctaataatgccacttcgtcgcgtgcactaggcaaaataattgcttttttaccaattaagaaaaagttatgcgccaaatattccgcgataatttgctgctgccagccagtagagtaaagatagatcgtttccgcttgatctaaatccgcaaaaaatggttgtaagtttaatcccttaaaatatttaaaagtttcagcaatgatcttttgtaaatccgtattgaaatctagcgtttgcttgttcttaacgttttgctcctttcgtgtagctaactcggacaattcaaatttcaattcgctgaaaccacttaatcccaattttttgcttaggcgaaaaatagcggacttagaaacgtataatttctgagctaattccagcaaactcaactgacttgctacttcaggatatttcaataaatagctaacgatcgctttatcggtctcattaaaactttcctttttcttcatgaccgctgtttctaaatccattctgtttcctttctcatcactgtttcttattaagaaaagaatatcatgtcgtactcaaaaaaggtagccaccctatttgagtaactaccttaatttttattcttgaattgaagttatgttatgacaattaattatttaagttctggccagtatggagcattaactggaatcatgtcatccaaaatcttcttagcaacggaagcatctggtacagtcttgtttaatgcaaatgcttgcagcatcttattgtatgaatgttcaacataagcatcaacaaccaatttttcacaagtttgttgttccatcatcaagcctctttggaagcgacctgctttacccgtagccattggttgaatgccatcagcaccaaacaatgctggtacttcaacaattgaatctggatccatattagaaattgcaccgttattagcacagttagctaagaacttttcatgagtgttaaatgcgatcgcatgacaaatatctacgatatattcagagtgcaaacctgaaatatcccaaatattattcttagcagttcccacctttacgattctttcacattcgccaaagacaatcttttgccggtgttcacgaatttcatcagtacgagtatgcttcggatcagcattagcaacttcatattgtgggaagtagtagtattgcatgtaattgtttggcaaagtttctggctctagcttatattcatcggcaactttcttaaaggtggcttcccaagaagcttcagtatccttgtcgtaatcgccacctacccaatagccgtgctctttgacatattccttcaacttaggcattaagtcttcgccagtcttcttgttgcgaacttctttccaccagccaaaatgattcaaaccataatagttaaagtcaatatcatgccaactgtccaaaccacaaatggcagccattctgtccatatcatcaatcggcatatcacaaatgttaattaccttagcatttggacgaagacgacggcaagcttctgcaacgattgcaattgtgttggagtagttgatcatccaagcatttggtgagtattcttccatccaatcaataatttgcaaaattgcgggaattgagcgaagaccataggccattcctccgggtccagtagtttcttgaccattcacgccatattttaatggaatcttttcatccaagcttctcatgtgatatttaccaacacgaattgatcccataacaaaatctacatcagtaaaggcctctttaggatcagttgtgtaagaaaacttaatttgaggtgctctttccttcatgataatttcaacagctttggcaatcttttcttgccgttcagcatcgttatcatagaacttcaactgtcttaatgggaatttatcctgactcttgattaaatcaaggacaaatcctggagtaaaagtactaccaccgccagcaataactactgaatatttcttaccatccataatctattttctcctttaaataaaactaagtttttatctctgtttcatttgccttacgcatatatttatatcatcttctcccacaaatgtattcgttttcaccagcttcagactttgtttcaagttttggaacgcgtttcactacgcgaaatatttttaaattttgccttaagcctaacaaatcaggtgtttaacttgcctttattagtaatagtgtaaaaatgaaaaaaataatcgtttcatgaccaagataaactataatttgaacattcctttaaccacaaaaataaatagtccgtatttgatgatcgtatagttttaattacaaaatacgactcaaactagtttcacttccatattttgtagtgtaattttgaaattaattataattttaatatctttctgctattttctatacaatataatatttttaaaacatatctttgctaaacgctgattttatcccaactcttagtcattagtacttgataatttacagataacttaggttataattatatatttttttatataaatttagcctttatcaaaaaactttcgaattatttattaaccgtatagtttttattttaggtcgccctaagtcttgataaactagtactctaaaaaaataacatccatgttttttatttaacacgatacgttattaaagcttttcatgtatagactttgtttttaataatgttagtatcattccatgaagagacatataacgagctttaaggaattgactactccttaagcaaaaaaatgacttataaattggaaatccttttcgtaatataaggggattaagaaaaatgacaaagaatgttaagctattatcacttatcggtatcgcagccgctttagcaggtggaagtgttgctatttcaaataataacaactctactgttcaagctgcttctatcacattacctgctggttacaccaagagtgccattattaaatggaaccaaactggtaaagcaagtaaggctttgattgatgcttctaaaaaaggcatgaaggaaaacaccaatagtgatgcgggttcagataatacgttagttaacgtgactaaattaactgcgtctcaacaaaaagaactgagccaatacactttaagcttaattaattctgcacgtcatcaacttggcaagcaaggctggacttacaaacgaggtgctttgcactttgcaaatcgtgtagctaacgaatactacagccataacagatcttgctgggatgccgaccactatgttactggaattgaacgcgcagctaaggcttctggccttaactcaaaagtaggtcaagtctacgaagatgaagctggcttacctatctcttcaacatacaatactaacttacgtccaatgtcagtattgaaaaaccaaatttactttaacgtaaagcaaatgctttttggcggttttgcaggctctgacagtcagatgaatgactcatctagatacactgaatgggaacacgctggtgatttacttggttgccgtactaagagctacgatgctaagactaaatactttggtattagtttcagtggcttaaagggtgaccaaagcaaggttagtgttcacatgatgggtgttgctaaatgttacatccaaaactacagaaaattcaatcattaaaactaacgctgtagttaaaaacttaatacagtttcctaatccaagagctcaagtagttcagtcaactatttgagctcttttatttttgcccatttttcatcaaaatcctgtcaaaaaaatgcagatattcacacattttcaattaagctatctaattgtttgtatacattagctaatactaatagtgtgttaagttattatcttattactattttgtctataatccttgataaatcaatgtttccgaaactgtcaaatcttttgtgtaaatagttctttctcgtaaattgattttttaattatttatttaatcaaagtaggattctaaggtgtcctgaacctgaccaaagcctttatgaattcgattgaaataacggtcattgtagctcattgcctgaatgccaataaaagcatcaagcgactgttcagttggaaactctgccttaggcttagctttgcgcttgatcacattgttaaatgattcaatcatgttagtcgaataaattgaagctctgatctgcttgggatagttataaaagaccagcagatctggttctatgtctttcaagcttctgataacatggctgtaaaccttgccccatttggtatagaagtcatgcaggacagctgtggcttcttctttgtttgtctgttgatgcacctgtttgaattcgttcatgatcttttcacgatcgtcgacgcgtactttagcgcagatattgcgcatgacatgaaccaaacagcgttgaaaatgagctttaggataagtcctggccaaggctgttttcatgccaacaacaccatcagaaagaaaaagctcaacttgctttaagcctcgggatttcatgttttgaagcatatctgtccagacttcaatgttctcgctaggtgcaatgcagtagtcaatgacctccttgtgcccattaggcttgatgccaatggcaatatagactgcttcacgctcaaatgtttctcggcgcaaaggaaggtatgtcgcatccaaatagacgcagaaaaacttgtcgcttagcttgcgtttgtggtaagcctcaacctttggaatcatctgcttggaaatatttgatacctgagctggactgtaatggctgccatacatcttttcaattagatcggctatttccctggtggtcacgcccttggagtaaagcttgataatcatgctttccaagatatccgagtgctgcttgtagccaggcagcgtgtgctgatgaaattgaccgttgcgatcccgaggcacttgcacttcaattgggccaaattgcgtatcaactttgcggaaataagcaccatttctagagttgccagtattccagccatttctggcatagggatcatagcccagaaaggcggtcaattcagcttctaacaagttattaacagcctgttgtagctctttgcgcaataaatcatttattttgtctggattgaatagagcttgagcaaaatctttggtaaaatcattcatgaaggagttcttctttctgtatgtgtttttttgttcaaaccaatcatacgagaaaggaactcctttttctaatgtttaaagaaataaatttaaggaatcattcatccttacacaaactattttacagtctccacattctgcttccacttcattcatataattctttacttgttcatcaataatgtctttcattattttcacccccagccaaattataaaacgcttttataattaaaaagaagacattacttttcaccttattgtggaaaacaaataagccattgcctgtatttttacaaagcaatggcttattcattattaaacggttattcctcacccggtgcagatataactattctcattttaccagtgaaagtgaaattcttcatctcatttggaataattaaattagttccgatcttcaaatcatatgatttgccatcggcttctaattttccttcacctttaataactgaaactaaaagatatggatgatcctttaagccggtcttccatgtaccatcgaggtcaatttgccataagtagaagtgtggtgaaacaggtggttcaactaaagtcttgatttctgcatcttgatccttattagtcttaacatctagcttaggatcaacatgtggcacagttgtaacatcaattgacttttgcgtatgaagttcacgctttttgccgtctttaccaacacgatcataatcgtacaaacggtaagtaacatcacttgattgctgagtctcaataactaaacagcctttagtcaaagcgtggatagtacctgcaggtacgtagaaaaagtcgccagctttaactggaacctttctaagtaatttgtcccattcgcccttatgaatcatttcagccaattcttcacgatttttagcatggtgaccataaataatgtaagcacctggatcagcttgcatgacgtaccaactttcggttttaccagaatcattttctaccttacgggcataatcatcatctgggtgaacttgaactgaaagattatcattagcatctaagaattttactaataacggaaattctttagccttaggattaccaaaaagttcaggatgctttaagtaaacatctcttaaagacatccccttgagtggaccctctgttacaatagaagcatcgtccttgtagccggaaatgatccaagcctcaccgacttttccatctggaatatcataattgaaaatatcttttaatttacgtccgccccaaatttttggtctaaaatacgggatcaaaaataatggttccatttaaaatcacctcatttttactttagctcatttaaaatcatctagaaaggtatggcttttctttcttttgaagaaaaaagatacacttacgaccacatatttcaagttggtttggatctataaaaagatataaattttataatatcagtcggttataaccaattaattatttatgtaattaggatcttatttcgtgaaaccgtaaaatagtttgtgtaaggatgaatgattccttaaatttatttctttaaacattagaaaaaggagttcctttctcgtatgattggtttgaacaaaaaaacacatacagaaagaagaactccttcatgaatgattttaccaaagattttgctcaagctctattcaatccagacaaaataaatgatttattgcgcaaagagctacaacaggctgttaataacttgttagaagctgaattgactacctttctgggctatgatccctatgccagaaatggctggaatactggcaattctagaaatggtgcttatttccgcaaggttgatacccagtttgggccaattgaagtgcaagtgcctcgagaccgcaatggacagtttcatcagcacacgctgcctgactacaagcggcactcggatatcttggaaagcatgattatcaagctatattccaaaggcgtaaccaccagagaaatagccgacttgagtgaaaagatgtatggcagtcattatagtccagcccaagtatcaaatatttccaagcagatgttccccaaggttgaggcttatcacaagcgcaagctaagcgacaagtttttctgtgtctatttggatgcgacataccttcctttgcgccgagaaacgtttgagcgtgaagcagtctatattgccattggcattaaacctaatggacataaagaagtcattgactactgcattgcgcttagtgagaacattgaagtctggacagagatgcttcaaaacatgaggttcagaggcttgatggaaattgagtccgatctgctggtcttctataattatcccaaacaaatcagagcttcaatttattcaaccagcatgattaaatcctttaacaacgtcatcaagcgtaaagctaagcctaaagcagagtttccaactgaacagtcgcttgatgcatttattggtatccaggcaatgagctacaatgaccgctatttcaaccgaattcataaaggctttggtcaggttcaggataccttagaatcctattttgattaaataaataattaaaaaatcaatttgcgagaaagaactatttacacaaaagatttgacagtttcataaattatctatcactagttactacttataagactaacatcttacttaatcaaactttaaacaaaaaaataagaggtgaactacaacatcgtcacgttatagttcatctcctactttaagttgtttgacaaagagtcacattagctagtctctgtctcttactacatacattaatagttaagaagtggaaattaattaccaaagcacctctatttcaatgaacctgggaatctaaattcatatgaactaatcgggcctactatatcaagactagttatttgtttgactaattcttgaaataaaattattgcgttattaacaccataattgtttactattttttggattttttctggacttttaactttttttggattctcaatatcataaaaataatccactttaatatttaaagtcctatattcagaatcattatcattttcttcatttgagcaattggcatgccccgataatgtcacaattgcatcgtttgcagaaatagccacagaaatatcatcaaacataaattccaaatagaaactgtcttgttgctgttctagttcacctttgtattcataattaagtttattaattataaatccattatatttaagctgtactgacatcgttatctcctatttctttaccatttgtggttgaaaaactgatttttttattcccacctgatagaaagacagtgtcttttgtttattagagctttcgtttatcttcatctttgctattactttagaagttttatgctgtaatgttttattatctatttcttttatttttattcgttttcttgaaaaactagataacttatttaaaacttgctgatatttttcttcactactttctaaatcaattccctgctcaacttctgtatacgtgcttaaactcaaacccgttaattttgctgcttcatctctatttaaattcaaactaattctttttccgaaaatcttttgtgataactggaattgatatgaatttaatctactattatttggattgattttattgaacttcatgtctttcgtttctccttcctataaaattcttttccctattattcaccaattgattatgaattagttcagccagtttcccaagttgatcagtaagtaaattcatttttcttatttttctttgatctttagtaggaaatttagtaaatccatatgtccagacaaaatatactttactctcatttaatgtaaataaaattctacagtttttccttacgccttcatttgtttcagaaagaaagcgaatctcatatacatgattttgtgacatcaattttttaacaatctcgtacttgatatatctgttagaatttggaactttatactcatccttaaaagaatatccaataataatcccttcttttacttcgggctttaattgttcaatattaccactactatctaaagtaacatttgaaagaaagttgataattcttaacaccgattcttgaatattaggattaagattatattcatcttctaaatattcttcggctaatttttgctcagacaagttatcatttatcaaatagaactggcgcatgggtcactctcctttgtctaaacattttacgtcaaaatcatgatattttccattctttgttgaactacagtaagtgttaatgtttttgcgatagactatcagccatagtctaaccttattctttagcttcatcaattatatcagcatccccaacctcagcacaaaagaaaaccgactccataatattccctgtcaatagctttttattccatcaaaaaaggaggacatagttctctttgataaaaaatctattccactaaatattttataaataaaggtgatttctatgtcctctcttaatcattgtattaaatcgagcttgacattaaagatgaaaatatcgtttttaaagcttgtttgaattcctgaattgtcaaattaagtgcaacagttaggttatgaagagatatattgcttgaagagttcctctgctgtgtgatattggaggattcggcgatatttgtggttaatggcatcagttgcctgttgaacataagcttttgacttgtctttcatgctcttgcccttagggaagaattgacgcaaaagaccattgcagttctcattggtgcccctttcccatggagaatatgggtgagcaaagtaaatctggcagcccttgatcttggtcatatccgcaaactcagagccattgtcaaacgtgattgatttaaaccaggcaggatgtctgtcaatctccttttgaagcagcctttggcatgtgcttgcccgatagtcaggaatcttgataactacttcaaagcgtgtggttctttcagtcaaagtcattaaagcaggctgattcttgcgtctgacgcctttaaccagatctccttcccagtgcagcggagcttttctgtcttcaatctctttaggacgctgttcaatggaattgccaagatgcttcttgtgcaaagcgtgaccgccatggctgtgatgacgcttgttcctgcgtcttttgagcttcataggcagatcaatattgcttatgtccagcaagccctgatcaatatagcgatagacggttggtgtgctgggacaagggtagcctggcatagtccttttgaattcaccaacgaactcatcgatgctggtggcatcaaatttagctttaaagcgtctggagagcattctcaaaaagacagcataatgcttcaatggattgcgctgatagcagtttttgcgacgcttctcataataaatctgtgcagtatcagcgtaatagtgctcatacaataaatagctgctgtctctttgcaggacacttccgcgtttgatttcgcgactgattgtcgacttatggcagccgacttcttgagcgataacagtacgggaagttatgccggaatccagcattgcttgaatttgtccacgttgtacgctggttaattgatgatagtgcttagaaatgctagaatttgaattggtcataaagatcttcctttcttgatttttcgtcacttcaagtttaggtcttcatggcctttttgtttaacacttagtgttgcacttcaattttaaatccgggataaccaaaaagtattaagaagtacattaaatagaagttgaatagcatgttaagtattgaagaatcaatcaaagaatttgaaacatattttcagggtaaaccaaatgaagttgaagtagtatcacgaactataaaacaaaaaagtagacggccacataaaccgcctactttatcctaattgttatgatgatcacttgagttagttaaatcatcatttttagttagatcatctatatttccaactactccaccaaatagtgtaaacacacctattccaccaaaaatactaccagccaccgaatgcctttgcatcaccaaaaaagcagaaatacaaatacatagaattgttactattgatactactatcagagatgtccatgcgagccaacctcttcttttttgacgagcaacttctaatctccatctatgcctactttcttcaacaccattattaattatttccttagcagcattcggatacaatttttggtatccctcaagaatatcaggaagcggaattggtccactatacatctcaagataagccattatttcttttttggtttctttaggcatctcagatttttgaatttgatcaagaatctgttcatctagcgaatctttatctgactttttctttatatcattttctagctttttacttggcttttgatctgccataagatattattccctttcttaagtcgtcccctatcctttgccaatcactggcaatagctttttcctcagcattactattactagaatatatcaacttgtttaataatttgacataaggcatagctacatttttcgataattttttaaacactaattgaatatcggtaaacataattctcacctcattcataatctctttctttattaaaagtatacttaaaatttgactcgtggtaaagattattcttctacatgcaatccacttctttccttattataagcatctgtaatacaataaacttaacagcaaataacgaggtgtttttatgattgataatcaacctaaaaagacaaaagcttatatcgcgggcgtaaacttaaacgaccaaaacttcgactactacatgactgagctggccaacttgactgaagccaacaacatggaagtagttgggcaaagctttcaaaatgcagaatcaattgtcgccggaacttacttcggtgtcggcaaaatcaatgaaattagaactatggctcaaggcttaaaagcaaaagttttagtccttaatgacgaattgactcccgtacaaattcgcaacttaggaaaattaaccaaaatgcgagttattgaccgcacggaattaattctggaaatttttgccagccgcgctcgaactaaacaagctaaattacaagtgcaactggcacgtttacaatatgaattgccgcgtctacatccctccgagaacaacttggaccagcagcgtggtggtggcttagctaaccgtggtgccggtgaaagtaaactagaattgaaccggcggacaattggcaagcaaatttcggctatcaagaaggaattgaaggctgttgccggccaggaagaaatcaaagcggcacgacgcaaccaaagtcgcatccctaaagtcgctctcgttggctacaccaatgccggtaaatcaaccacaatgaacggactattgcgtgaattttctaaagaaggagcctacaaggaagtcttcgttaaaaacatgctttttgctacgctagatacttccgtgcggcggatcgacttgaaagacaactttagcttcattctgtctgacactgtcggtttcatttctaaactgccccacaacttggttgaatccttcaaggctaccctgcaagaaacacgtgatgctgatttattaatcaacgttgttgacgcctctgacccgaacatggtccaaatgattcggacaacacagaacgttttggatgaaattggcgttaaggaaattccgatgattaccgcctacaacaaggctgataagactgatcgcaattacccacagatcgaaggcgacgacattctttattccgccatcgatccaaaatcgatcaaactactggccaacttgatcaccaagcgcgtttttgccaactataaaaagtttgacttgatcctgccactaagcgcaggcaaggaactggcttacctgcatgatcgcgcccaagttttacgtgaagactaccaagacgatggcgtccacatcgaagcgaacatcgcgcccgacgaccaaggacgctttcgtcaatatttggcctaactcgattaggaaaaaatatgaaaaaacataatctgctgttcctttttgccctcacatttttgttagttcctactaacacgcctgtaatggctgctaaatatagtgctagtgagtcaaaaaaggtgcgcacttttcaaaaaagctatcatcgtttgagccagaagaattacaatcagactacgctctttaccgtgcagccaaattttggtattcctttttcagcaggagtgcttgaccctgattacatcaaaacttcaatggcttatgtcaattattaccgctcattggttggactgcctgatgacgctaactatgctaatgataacgttaacgcacaacttggtgctgcagcgctagcttcagttaacgcggagcaaaatctgcgagctcacggcttacaaggttacgtcaagcctggctatatcagtgatactgactgggacacagcggaaaataccacattgggcaatatcaatttttcagaatcaactagcggaaccacggctggcgagatcgttaccgatctgatacgtgaagataataatattgcaggtaatggcaacatcggtcaccgcggcatgatcctctcgacgcgagccacccgaatgggaattggtgctgcttatggcactgaaaataatgtcttgtattctgttgaacatggactatttgctgatgatattttgcgtcagcctgtgaaaagccgaatcgtttatccagctgccggcgtttttccttacgaattagttggtggtaaaacgccatggtcttactcaacaaccgagcgaatttctggtcagccgaaaatttacatcacggatttgaccaccaagaaaaagcggcaagcgacgcaggtgcgcaacttcggcactgctctttatggtgacggctacacaacgacaatcacttaccgacctggcaaaaccaagttgatcagcacgcacaagtaccgtgtgcaaatcggcaaacattatagctacagtttcaaatttttcaggcaaaatagcacattgaaaaataaacagattgtaaagcatcgaaaatgaaatacgttgatatgcaaaacggctcaagcagttgtacatcctgcttgagccgttttagatagtaacaaatattgtagtctgttcaacaatcttcatgtaaaataatactcaggtctattgcagcggttagctaccgctaagacttagtaattttagcatggctacacacccctcaagattttttaagttacggaggtggaagcatgcataattgggtagactggagaagtaggcttacaaatgattgcttgggctattgcgtatgcgataacaaaaaaagctaatcacaatgattagccgaaacaacagtcatcttaagttacgattggagttagcgaccgacactcgctagctccttttcttttattattttaatatgatttagaatttattgcaatgtttagaagcgcttattctacgccaatgacgtaacgcatgatgaatcaatagcttgttataccaagcataattgtgcttcatataattataggcggttgtaaaattttccagttggctagccgcaatgaattgattgcgtgtccaatgccaatcctgagtaggataatataaaattttcactcggattacccttcctactgtaataattgcccgatcatgatgataacgcgtgcgagcaacattgaggtagctaccaattaaagtattgcgccagtatcgattatgcagataatttttctcccaaagcaaggccctgcgcaataccttagaaatgcagtaccattcgcgtttgccgttaggcaattcaaccaaacaccaaagatattggtgtctcttcgccattcaatccaccccttctaattaatatcggctttaattataccgctactagctattcagttagaaaatcaataatgtcagaaaatattaggtcatgatgtcaaatctattcaactgacatcatttgtcctaagaacgcatttaccgcttgcttaatatactcgctgcaaaggtgagtatactgcgttgaatttctggacatggctctgcttaaacggtcttgatgggtgtcattttaatcccttctttaatttttcagtctagagaaaacttttatcaatacaaaaaagcaagcgcattaatcgcctgcctaaaagtattccaaattacttctctatagcactctcttagcaatcgatggtgtaaagtaactcgataccgtttgcaaaatagtaccttgctccggtgttgctgcgtttacatattgattgtttcctacataaattgcaacgtggtatggagctgtcgttgaaccccagaagactaagtcacctggctgcaagttgttcaatgaaacagtttgaccaaccttaacttgatcataagttgttcttggcaagttaacaccagccgctttttggtaaacatattgtactaagccagaacagtcaaatgaatccggaccttctgcaccccagacataattcttacctatctgttgtttagctagcgcaacaattgaagcggccttactagtagcttgcgttgaagaagtttggttagtattttggctagtcttcttgattgccgtattaacaatttgcttagccttcttcaccttagctatcttttcagccttcttctgagtagccgttttagtagctactgccgctgtcttcttattaacagtagtctttgtctgcttagcttccgttttcttaacagttggtgcttgcgatacttctgctttttctccagcagtaacatctacggtataacgcgcttcaatccattcacgcgttccaaccttgtaccacaagttgcccttcttatcgagtgcagtctcagctacattccagaccgtgccgtccttagcacggtagcccatgaattgaccattctcatagttggtccaaatattcaggctcttacctggtaaatagctaatcttaacttgcttaatcgcagtaaaattagctgcacgaacagttttcattgatgtgattgcggaaacacccgtaacggtcagggctgcagccgctcccactttaaaaaaattatgtttcataattgaatccccttggtagcgaaacaggtgaaaacttttcacctaaaattacccactcttactatgtaacgccttcattattgcatgtcctacctcaagaagcaaattagaacattacaatattacaaaaaagacggatcactggaatccgtcttcattacttactatcttaatttaaaacacgcttagcaacacttgggtagaagtatgaactcaaagtttgcttgattacgccttgacctggtgtagcagcgtggatgtattggttgttaccaacatagatacctacgtgatatggagcacttgcactaccccagaaaagcaaatcacccggttgaagattatccatagaaacggttgatccttgcttaacttgatcataagtagttctacccaacttcacgccagcagcgttagagtaaacatattgtaccaaacctgaacagtcaaaaccgttagttcctgtaccaccccaaacataggacttgcctaattgtgctgaagccaaagtaataactgctgaagcatcaccagttgcttgaactgacttcttagcctttttagctttcttaactgcttgagccttatctgaactagcatcaacagtatattgagctaaaatccattggttatcaccaatttggtaccatgtacggcccttcttatcagtcttggtgtcaaaaacattccaagtagtaccatgttgagcacgttgaccagtaaagtggccaccattgtagttgtcccatatgttaattccataacctgcaatgtagttaatctttactttggtagtagcagcttgaacagtagcattagttgaatctggcttgatgacatttactgcagctacaccggtcagagttaatgcagcagctgcggtaacttttacgaaattgctcttaatattcatcaaattctcctatatgttttcactatatatataagcattcttagaatttattacttaagctggtaacgaaaatattaattcatcgaaaaatctttaaatttctttaacgtatttaacaaaatctataataatgtcctaatgttacagtagtgttacaaaagcaatactgatttaataaatattacgtttccgtcaaaaagaaaaatagctagggagatttccctaactatcttaattagatattttatttttaggaagactaacgcaattagtcgattacacgcttagctgatgatgggtaaaatgaagctaaggtttgttgcttaacattttgaccaggagctggagcgtgaacaaacttgccgttacctacgtagatacctacatggtagttaccccagaataataagtcacccttcttaagcttcttagttgaaactgaaatggtcttaccaagagtaatttgaccgtaagtagttcttggcaaagtcttgttaatagcattcttgaaaacgtaagtagttaagcctgagcagtcaaaaccgctaggaccagcagcaccgtaaatgtaaggcttgccgatttgcttcttaacaagcttaacaaccgcattacgctccttagtagtagctgattccttcttaactgaacttgaatcaggattggtagtttcaagatctgaaattgagttgttagtattgatagtagtgcttgaaacatcatcagcgtgaacagctggaacattgatcattgaaataccggcaaagaatactgataaagctgcggtgtattttactaaagtacgtctaaaattcaaaattaattgtctcctctaaaaattactaaatttgtttttgatttcttaaatcagttgacggtttatataataccgactgaatgttacacgaatgtttcaaaagagctaccatcgcgttaagaaacatgttaaaaaaacagattttatgtaaaaaaaggagaagcaaaatgctagcgaagctttgctacaagggcatcgagcgcgtttttagtttctgttaaattgtcgttaactaagatatgagcgtattgcttcaaatcttcaggtaaagcatttaattcactgccgctaagtctttctttaatcttggctggatcatcgccccgctttaaaaggcgctgttttaactcttctttagtagaagttgtaacataaagaaaataagccttgtcacctagctgtttaatgtaggaataaatgcccttgatatcgacaattaatgaaaccagatcacttttttgccaggccagattcaaagcttctcgacttgagccatattgataagagccgtacttaatatgctcaaaaaagtgcagctgtgcaaaagtttcgtctgtttcaaaatgatatgacacatcttgtttttcgcctgatcgcatcggccgcgtggtatgcgttaatacgcgtggaataccatatttttcagttaaatattctgaaacagtcgtcttgccagcaccactaggtcctgcaataagaattatttttttcaaaacctgattctccccacttgaaaatgttgcttttttataatagcattcttgtgttataaaagactaagactttttctcggaaggaagatacacataatgaaaaaagcagacgtaaaagttggtgcaatcgttggtgccaagtcagaagaagaacttaagaagccattccaaggcaaagttgaaaagatctacgaaaattccgcattgcttgcaattacttcatacgatcccgttgacaccactgctatcagcgacttgaacaataagatcgtagttaacttcaagaatttaaagactgctcgcgctgccaagaacagcaagactgcttcaactaatgaagttaagattgaaaaaattgccaagaagaacgatgataaaaaagaagcagacaagaagtaaaatttgacaaaaatagcccgcgcaatgtttacgcgagctatttttttgcctaaaattaggacatcgatacgagaggaaatattttatgaaagaaaaaacgcgaactgttttattttggtttattttaatccagccctttttagacctttattggttctacaacggtaaattagcggaagttttaccatttactctacctacgattatccgaattttagctgtttttgtgattttctgtatgtttttcagtcaaaagcaaaattggcaaaaattagggcaagacaagtggttaattctatatttagccctactaattttgtattcgattattcacttaatccacgtcaaaaattttaacagcattaatcctaatgactacaattattcaaccgtaagcgaaattttttatctcattagagtgcttttacctctgatggtgatcttttttacaaaagaattgaatttcagtcaggagcaattcagacacgttatcgaaggcatcagcggacttttttcatttacaattgtcattaccaatctttttgtcatttcgcttagaagctacgagacaggcccgattagcgctaatatttttgaatggtttgttaaccccaatatcggttactcccatatggcctccaaaggcttcttcaattttgccaacatggtatcagccgtactctttatgctggtgcctctgatgctttacttcatgttcagtcgttttaactggaaaatcgtcactttgaacgtagttcaagctttagcgatgatcgagttaggaaccaaagtggccctcatcggtttaatcggtggcgtgattatcagtattttgctgtatgttttccacttatttattgttaaggatgttaacaaaaacggcaaagccattatcgtggcgcttttaatcgaagcgggcacctttgccatcatcccctttggtccagcaatccagcgctataattatgaaaaatatttggctcagcaatccgatgattctttgacacaggccaagcgagaattaaatgctggcttaaaaaaatatcctcaaggtaaacagcgcaaagaatttttaacgaatttcatcggcaatcattatcaagattacgccttaaataagaagtttgtttttaaaagctacccttataaatacgatcctgaattttggctcaaaatcatgaacgagccaggcaccgctagaatgcaaaaccgacatgtagaaaaagcaatgctcgatcaagttgtgaagactaacaacaatcggctcgacaagttcctgggcatttcttacacacgagaaaccaacattttcaaccttgaacgtgatttcactagtcaaatttattcacttggttggatcggcatgctgttgttcattgggccttatgtcattatcctgctctacgctttaattaagtggctaatgaacaaagaaaagcggacttatttgatcagctcaatgttgctttcaatcgcctttatgattttcgcagcattctcgtcaggtaacgtaatggacttcttaacagctagcttcatcctggctttcgttgaaggcagcttgttagctagcgtaaccagaaaagaaaattaaacataaaaaaaagttaggtagttgcttgcctaactttttcttagtttttaaacattatttttcttgcttaataaagcttgaatctggcacccgaattaagtagtaccgagttgctaaatgacctgcatgcatcccgattccattttgccaattccgcttgtacttagccgtataaattgccacgtaagcacgttgatactttttatccattttagccaattccttttttacataaggaatcttctcggcattcacatcaagcgcagtgttaccataagcaatcgaggcataatcactaccaatcgtgaccttgctgccatcgcgataaaaagtataagtttgtgagccatatctctttttagcagaattaattgttacatagcttgaatttcccgcacctgtacgcattatcagtggctcatacttcacgcttgaagtaatgcggtttgcatcttccaggtctggattgtccataaaagtctgattaaacatccaacctgcagctaataaaagtactacaatttccacaatattaagagccatattcggccaactaaagcgtttatgctgtttgataatcatcttaatccgtctttgacggatgttctggacgatgaaaactaaataaagaatgatggcaacccaaatcaggatcccaatgatattccagctgaacatatctcgccctgctatataaaacatagaaacatgcagaagttttcatatttctacatgtcagaaagaaatatattttcctttctttgtcttatttactgctgtcttcatcagtattccgatattccatctggggagtaatcgcattgactaactcttgcagcttaagggcttagccagcccattgtttttattttgttaacgctagtaaatttaatactgcattgtcatcacgatcattgctatagccacattcataacaaatgtattcattatgcttggtgccatgttttttattgccctgcagagtaattttgtctgcaccagttttgacatagccacaattggcacatctttgtgttgatggatatgttttatcagctagaattaattctttgccataccattcacacttgtaagtcaagacttgtctaaacttgccaaatagtgacctttgcatgcctttggaggctacatgggtcatcatcatttgtttgacattcaagtcttcaatgacgatttggtcataattgtttacaagctcagtggtaaatttttgcaaaagatcattctgaatattggctgctttgcgataatcacgctgaagcttggttctcacttgcaggtaattattgctttggcttgccgatttaccgttaactcttctctttttagacaatactctttgataatgcttgattcgcttgtacagtttctgtagttttgctggcaaaacattaatcttgccttcagtgtagttgaaatgcccaacgttgacatcgatggcggtctttttgccagttttagcctttagtccagcctcttcttcataggaaagggcagcgtaataatgtcctctttctctaaagatgctggcaattttaacctcttccatctttaatgcctcgtatgctggaatatcaaaccaagatttaatccctctaggcttatctaatctaagcttgccattaattatcttggcgcgatcagttttaaagccttgacgtggagctttcttagatttgaaatgcggcttgccccaatcaggctgggtcttgtcaaagaagttcttccaagcattagccagatccttgactgctaattgcagacagcgagcagacaaagcaaattgccaatcagccttgttattgactaattcatcccgcactcgatgctcattaggactaggattattatccttgtctaaagtccgagcttcatacatgtcttgccaggttgctaaagctagattccagcagtatctgcgatagttacaaagacattcaagttctctttgcattatcttatttggccttaattcgactacctgagttttgatcatttgtttcacctccaatgcaaacataagtttagcaaaggatgtaacaaaaacaagcgaacaaaatattaaatttttagcagcagttaatttgcttctatgttttgcctttctgaacaaattacctgtatctttttctatattgccattaaattctatatttcagctaaccatttaatcctcctttttttcaattatatggtaaaaaaagcaaaatttgaataggataataattgaatacttagttaaatagtgagaagatcttactagtacattagatttattagggaatattatggtagcaatagctttttattcaattactgggcaaacggaacgttttattaagaaaactcaactttcggcccatcaaatcgacgatgccacccctaagtatgatatgggaaaatcttatatcttaatcgtaccctcacatcaggacttcatgatggattcagtcgttgattttttaacgtataaagataacaaaaaaatattatagggattatcggttgtggcaaccgaaactttaacgacctctttgctcaaactgccaaaaagatcgcggcaacattgaaagtgcctattttgtatcttttggaatttagtggtactaaccaagatgtcaaaaatgtacgaaaaatcgtacacgatctttctgctggtgagagtactaagcaagtccaaaagcctaaggaattacgtgggaatatcagctttttgagtgattttagagattaaatatgactgaaaaatattacaaagcaattaactggaatgacatggaggaccgggttgacaaatctgcttggtcccgcctgaatgatattatctgggaaccccgtaatgttccagttagagaagataaaaaagaatttttacaattagacaagccggtgcaagatgccttgcttcacgcattcggagcactatctttttcatctggactccaaatgaaaaatgggctagagcaaattaaggtagatgccatcacaccagaggaagcagctgtgctgaatgccttgcaatatttggaatctattgccaataaaggctacagctacgttatcaacgagttgacggactcaaatatagcaaaagacgttattaactgggctgatgacaatccttacctgcaaaagaagattcggattttgaataaaatctaccaaggcggggatgcactacaaaagaaggtagctaacgttatcctagagacagctctctatcattctgccttctacgctccgctttatttattcggacaaggcaaaatggtacgaacagctgaaattgttaagttagctttacgtggcacttcatttagtgggatttatcctggttacaagttccgcttaggctaccaaaaattaggtaaaactgagcaagcagagctaaaagaatggatcgataacttgtacgatgtgctaattgataatgagaagaagcacattgagttaatgtacaagggcactgactggatcgatgatgttacgcactatctctactacagtgtcaacaaggcctacctcaacctaggtttttcagccaagtatcctgacacttctgattcaatcaaccctattattgaaaaaggggtcatcaagaatgcagtgcttgaagacttcttcttctacactaacgatcactcgctgactaagtttaaagaaattaaataattacaaaagacgcaatcgaaaatgatccgtaccgtgtcaagtagacagcttaaatatataaattaatttgattaatcagttcgctattgtgcgagctgatttttcttttcatcaatctttttccaaaagtctttatatcttttatcttgttttattggatatgaaattatattctctggattattcttagcttcttttctaacctgacctgcgctcttgccattgaagcgctcctgaggatcataattaatatagtattcaatacttgctttaaaggctttttccatctcttcatagctatttgccttcggataaagaacttctcgcatttctttaattaaaccttgccagccttccattgggccattatcaatacagcggccaattctagacattgattgtggcatgccatgttcttctagctcatgcttaaaaggcatcctggtaaattgaaatcctcgatcactatgaagcattgcatgactattgggctctcttttccaagcagttgacagagcagcgttaactagggctgtatcattgcgcttgcttaaagcatagccaacagggaaacgatcatatagatcaaagatagtacagagataaatcttttgacttgttccaggaattttttcttcagtaatgtcagtgcaccatttttcattgggtttagtggcattgaagtctctatgcaatagattttcggcagtttcttccggtctagcagcttgatagcgatacctcttattaaatctggccttgctagtatagatgccattcacgcacatcaagcgagccacagttctacggtatattttggcctcaccgtctgctagctcattgtttaaagccaaagtcatcttaggagaaccaaagaggctgttattgctctcagctatttctttaatacgcttaagaatcttttgatctcttagttcacgtttgcttggcttatgattaagccatttgtagtaggctgaccgggcaatattggcttgtttgcacatccattcaattgaccacttatattctcggtgacattctttgatcaaactgtaaagagaatttcgctgctgttgtttaagtgctatttgtctttgttttggctgtccagcaaacacatcctttctaattccttcactttttttaggaaggctatctcttggtctttaatatcattttcttttttaagctgttcaatttcacgctttagcctttgagtttcagatagctcagcttcttttaaacgatgaccgcgcctatctgctaagccgtcagttccctttgcgctgtatttttttgaccagttgtatacttgggcatagctgcagccaaatttaagagctgcttccttgtagttccattgatgatccttgcagtatttcactatctgtttacgttcttctagggttgtcttttttctcttagtcatataagcctccagaataggattgtagtccttgagttcttgatgactattatacttgataacccactgctttaactgtgcagcacttcgcaaaccaaacttatttgttagataatcatatgagccttcgccatttaaataggcagctatgcatttgagtttaaaatctttactgtatctttgattatatttatgtggtcttaatgcttctggcccatgatctttaaatgcatatacccattggcgcagtgtagtcttgccagcccctaaaactttcgcaattgaagcaggtgatgcttcgccacttatgtattgtttaactgctttaagcttagcttcatagctaaatttactttttctagacatacaaaaagtcctgctttcatagatagtacaattttatatatttgtactgtctactaaagtaggactatatcaaaattcggttgcgtctttttttacttcttagtagttttcttggttgcctttttagtagcggttttcttttctgcttcctttttttcaggcttcttatattcacgtattgtggttagcttttcaataattgcctccaccagttgatcaacaatcttcgctggatcttgttcgatctctacttcactggctaattgatcaattctaaagcctgaaacattaacgtattcagagcgcgtttcaaagtaaacatttaaaggatattccttaccctcttcaaagaagttagcaactcgtttgtaattgctataaggcaaattgataatatttgtctccaaggcaaaagtagccggccgctgaccagtcactgctagttgcgtttggatcaatgaattatgcttaaaagcagcgataacttccttgaccatcttttcagcatacggcttgattttgctcttcgacttgctaatgtcggcatatttaactgtttcaagatcttgaatataatcttgattttcaattttttcgttgagatcttttaaattaatttccaaaataaactttcctttttcattggttataattacaaaatactacaaaaaaattttttgtcatcctttttaaggattcaattcagtatttttagctttttatttgttaaaatgacactatgaaaaagcaaaaatttgatcttaagtatttatttttactcattcccattacgttaattctcattataggattgatttacctttttaacaaaaataaaatcgataatgaaattaattggatgacaatgaaggaagaacagcggctcaatgtcccgctagaaaatcaactgcccgatctacccaacggctgcgaggttactagcctatcaatgttactgaattactatgacattaaggttaacaaatatgatctcgccgataatattgctcatgttgattctttcaccgacaacggtaaatatcgcggcaaccccaatcaaggctttgtcggccatatgtctgtcgctaatgctggctggtgcgtttatcatgggcctttatttgacgttgcacgtaaatataccagccacatagaagatgcctctggcagcaattttttagcgattctcaagttaatctccgatgggcatcccgtgctgatcattaccacaaccacttttaatcatgttaacaatatgcaaacatgggaaaccaatactggtaaagtcaacgttacaccgtcatcacatgcctgcgtgatcacgggatacaacaagcaaaagaagcttgtctatgttaataatccttacggtattaaaaaccaaccggttaattggcataacttagaattgagttatgaccaacaaggacgccaggcactttacatcaaataacaaaaaagggcaagccacgaaggcttgtccttttaactcaaggcacatgctcaaagcatatgtggacgtttaaactgttcacatcagtgcgtccaacatcagcacttcccgtgcttgccacttaaggcggatgtcctctatctcataaatatacgcatctcgcgttcattaatcgactcgtcagtcagtaattgtactattttttatgtttgatgtacagtctagcacttttaaaatgacgatatttaaatttataaaaaacttcagtacacatagtcgataacatgaaacctaaagcaatagcaccagtaacaattgctactcgtagaagcaaattctctccttgactataatcccccacaactaaagcacgtactgcttgataagcaggcacgcccgggactaacggtactaaggcaggaatattaaagaccgtcactggactttttttaatgcgtgcaaaacacaagcccaaaatacctatcaaaaaggcgccaattaaatttgaaatcattcgcccaaatcccaaattaaagcaagtccaatatgccatccagcccactgtgccactgactcctgacaggtgaagatcgcgatgcggtacattaatagttaatgcaaaacccaccgaagctacataagaaaaaatgacattaataataatttctaaccaaagtggcatttttatactcctatgaatttaagtacaagtgcaactccaccgcctaaagctaaagcggttaacacagcctcgcacattcgcataatccctgataataaatctcccatgaatagatctcgcaaagcattagtaattgccaagcctgggactaaagtcatcagagcgccgatcaaaatattatcagtaatcatttgtggattaaaatgattgaataatactgccaagatccccatgaccattgctgcaattagctctgataaaaaacgaatcttagtatattttttaaactcataatacgaccaaaaaccaacagcccctactaaggcagcacctgggaaatcaacccagtcgtaattatccataaacaaaaccatcaaggtagcagacaatacagcagctcccaatacctggagccacattgggaaagtaggtgcttgtgatactaaagcaatcttttcttttaattcagaaagagtgatttttttaactgcaaattggcgcgacaagtcattaacccggtctactaattccaaattgatgttgcgatcacgaatttgtttcatctgacttagcttgccaccatctaagctcatgaaaacacaggttggcgtcgcaaaaacacgcggatcatcaattccggcattgcgagcaattctgagcattgtatcttctacccgatacatttcgctcccgccttcgatcattagtcggcccgcagttaaacaaatatccattacttcttgataaaattggacatcccgcttctcagacatagttttagcctcagttcatagtttcaatatcgatggtcttgtcgacccaatcaccgcggaaaaagtcacgttcgtgactaacaataatgactccgcctgggaagttaacaatcgcttttctcaaagcatccttggtatcgttatccaagtgattagtaggttcatcaaggaaaagcaaattagctggttcaaactgcatcttagctaattttactttttcctgttccccaccagaaagttcctttagtggactcattgcttgttgtgcagttaagcccatgcgtgccagcgcttgtcgcaattcctttggctttttgcgttcaaattcttcttgtaaatattggagtggagtcatgttgctattaggccaggttagatcttgcttgaagtaagccaactttgcagtaacagataactcatatgaaccataaattggctttaattgccctaacaatgtcttaagcaaggtagtcttaccaattccgttaaaaccagtaatcgccactttttcatccccaccaacagagaaattgaaggctgacttgaccaaagcatggtcgtaaccgatgaccaaatcttgcgtctgtagcaacaaattagaagcagtcgcaacatatggaaattcaaagcgtgccttgcggttgttttttggcggtgtcaaaacatccatccgcgccagctgcttttcccgtgacttagcactcttagcacgtgtacccgccttgttcttgcgaatataggcctcagtcttagcaatcttgcgttgctggttagcataagccttcaagtaggtctcacggttggctgctttttgccgcaaggcttgcttcaacgttcctgtataacgagtaattgtgccaaaatcgatatcgataatgcagttagtgattcggcccaaaaagtcataatcatgactaacgacaataaaggctccagcaaaattgttcaaatagtcaaccagccaatcaatatgtgaaacatcaagatagttagtcggttcgtctaaaaccagaacatctgggctttgcaacaacaactttgctaaaattattttagagcgctgaccaccagataacttagaaacatcgtgatcatagcctaaatcagctagtcctagtcctgaggcgacttgttcaatttcagtatcaatatcataaaaattattttcttctaaataagtctgtaccttgccggctttttctaacagggcttcgtccccgttttcggcatatttggcatacagatcattcaactctttttctttttgaaataattgatcaaaagccgtccgcaaaaagccacggatagtcacaccaggtgccaatttagcatactggtccaaataaccaacatcaattttattttgccaagttacttgaccatcatcgggcaaaatttcacccgttaaaatcttgattaacgttgacttgccaacaccattttgaccagtaacccccatatggtcttctttgttaagcacaaaattggcatcttcatataaagttttatcaataaaactctgacttaaatctttaacagttaataaactcatttttcatcccctattatttagctgattcatgttctttttcataattttggagtgcatcaagaacacgaggccaatagcgcttaggtaagatcaattgcaaacgatcatgataaataggaaaatcacttgcttttagccccgtaatcttagctagctcctgatctgtcagcttatatttataaacaatacgcttaatttcgactgatgcatgtcctctaaaataggataggccgaagaaaaagatagcaaaaacacttgctgtaatgattgctaattgcaaattcatcctgaagctgtgtagacaaataaaaatcacggcaataaaagaaatcacagctgagagtacaccgtaaataactggaaatattgattctttttcttccttttgcataatcttttcctccctaattgagacttagtaactttacgaacttagcaaaaattgttaaagtttgcaagatacgacgttttcattattttttacataagttaagtatacttagcaaaaatgaaattgcacgaagaaagaagaaaaatgagccaagaaaagcaaaaatactattttttcccacttcgttttcaacaacaggacttaaagattgaactagttttgcctcaaattacgcaagctgaggcactttatcaagctgttgtccgcgatcgaaagcaattaggtcaatggctagcctgggctgatcaaatgcactcagctaacgatgaagcaaaatttattaagcaaattcaaaccaaaatgtcccagcagactatgctcgtgctcactattttagtcaatggcgaacctagcggcatgatcgacttgcataagctagtgccaaataaaaaagccgagattggctattggcttgctagcaagtatcaaggccgcggcattgttactaagagtgtaacggcgttatgccaatatgcctttagtgaattgaacttgcaatacattgatctgctcgttgccgttggcaatgacaagagcagcaatgtcgcaaagcgttgcggttttaaattaatggggattgagccaaaattaattaatggctatgacggccaaatttttagattaattcgacgttaaaactactttgttagcttgtcattgcgttaaatattaggtagactaataaaacgagtgtttggaatcttaatactttactaccaaaacaaactcaaatataattatgttatacgatgcttagcatcaatgagtggtcggctcatggtcaatctgattctaatgcaggacataagggcctgacgggtcgcagggaccaaaataaacctgatattatatatctaagacataagggcttagctggtggcagacaccaaaattaaaccgacttaagagttcacgagtttgtgaactcttttttattggagaaaaaagagatgaatcgcaacttatttaaaaacgcaaatttaaaagaaatcggacaattacgtcgttatatgtcgattatttatgataatgctgacttttacagcaaacactttgtaaacaaaaccattatctacactactaagaataaaaaaaatcgaacttactgctagaagagataattttatgcatttgtgtggagtaacgtatatcgacggtccaagaaaattttttaatgatgcattagatcaaaaaatacaaatcaaaaaaatacttataaaaaaagatgggtctacctttcaaaaattacaaattatgaatcaatttcaagaaatgcttggaccacatttaagattaacaggacccagtaattttacatatttaaaatttgatcactctatacgtaccaacaaaagcatactagctcttgcactattaaataatcaaaactacatgatacctatctctttattaaatctaaaatttattcatccttttccaaatggagaaaaaataataaaaatagaatctcgagatctaaaaactggtaaaattactattctcaactaaaaccaaccagtcagatctttaataatgaaaaagataattggaactaacaatgatggtaaaaaatttagcgttttaacatcacgaatcttcaataaagctaagccagagcaggcaattaaaaagccaccaacaatggaaatctcagttaccaatggtcccgtaaaaaagctagccgacaaaaatttagctaccaggtaaatactaccctgccagcaaaatagcaccggagcaacaacgagcatcccccaaccgaaactagcgccaaaaaccatcgaggtcacaaaatccaacgtagcattagtaaacagcatcgtatagtcgcctttaactgccgcaattactggccccacaattgatagtgctccaatacaacaaagcaaaatttcagtggccagccctttacctaagtttgatttacctgttttttctactaagcgatcaaaatggccagagatatcccaagccgtgccgcacaaaccaccaagtgctaagctaacaataaataaaacaggatagtgactcttgggcatattattagtaacattctcccagccaatacctaaggctgctaaacccattgcaataaagagtacatcttcaaatcgtttattgattccttttttcaaaaaacagccaatagttgttcctactagtaaggctaacgtatttacaattgttccaatcatccttctcacctcttaagattattttaccgcagaaaaaaagtatccttgtcggatactctttcatttaccagtgaaaatgccaaccgctacttgaactggatgatgaacttgaactagacgagctgcctgtccctgttccttcaccataaccagaattagaaccgctggctggcttatcctgattttgatcataaatctgatagtttgtaaaagcctgcggatcatcccacttaatgtgattgttctgatcattcaactcattctgccgtgtttcctcgttattaagcgtttgggtcgataaattcaaattcttgcgaattctatcagaagtcttttgcaattccttagttgaagcaacttgaattgaggctccatcaatccaggcatcatgaccttgaatatagctactcttcatatttttcatacagccacgataattcaacgccaagcttaacatatcgttgaaggtcaaattagttttcacatacttattaaagacatcaactagcttgcggtaattgctgagcgtattaactgacatggccttgtgggcaattgcctcaattacttgacgctggcgcatctgacgaccatagtcaccacgtggatcttcttttctcatccgcacataagctacagcatgccggccatttaagtgctgtttacccttgtggaaatcacaccagtcatatgaaaagtcaaacggcacattcacatcaacaccgcctaccgcattaaccaagctcttcaatgccttcatatttacttcaagataataattgattggcacattaagcatggacgagaccgtcttcatacttgattcatgtccgccaatttcataagcagagttcacccggaacataaagtatttgtcacctggatcgcctttaatatctgctaaggtgtcacgtggaattgaggtcatcgttgccgagtttttttgcggattagccgtggctaaaatcatggtatccgaattacctcgatcatgccgtccttcaattccttggtcaactcccaacactaaaattgaaattggctgtcgattaacaattttagcggaagtagcagtattaccgccattcttgctatcaatcacactgtggacagtaaagtacatatgtgcggcccaagctacgccaaagcaaacagctaataaagctaccacgcccactagccgagccagaaagttccctggcttcagcgctggcgcgtctgccgcaaatgcacgattacggtgaagattaagcgatgaacgacgagcacgataatcttctcttcgttttggattttggtacattcttttgatcttttcccttcgaaattaatacaagttagtttatttgtatcacttttcgtctctagataaaataaaaataccgataattaataataacttattttcccgaatttaaaattgaagtgcaacactaagtgttaaacaaaaaggccatgaagacctaaacttgatgtgaccaaaaatcaagaaaggaagatcttcatgaccaactcaaattctagcatttccaagcattatcatcaattgaacagcgaacaacgtggacaaattcaagctctgcttgattctggcataacctcctgcactgctatcgctcaagaagtaggctgtcataaatcaactatcagccgtgaaattagacgaggcagtgtcctgcaaagagacagcagctatgtcttgtatgagcactattacgctgatactgcacaaatttatcatgaaaagcgccgcagaaactgctataagtgtaatccactgcaacactatgccgtctttttcagaatgctaagcagacgctttaaagccaaatttgatgccactagcattgatgaattcgttggtgaatttcacaggattatgccaaattatccatgtcctagcacgcccactgtctatcgttatattgatcaaggattgctggatataagcaatatcgacctgccaatgaagcttaaaagacgcagaaacaaacgccatcatagtcatggtggccatgctccgcataaaaagaatcttggcaattcgattgaacagcggcctaaagaagttgaaaacagaaaagttcccctgcactgggaaggcgatttggttaaaggcgtcagacgtaaaaatcaacctgccttaatgacactgactgaaagaaccactcgttttgaggttgttatcaaaattcctgactatcgggccagtacttgtcaaagactgcttcaaaaggagattgacagacatcctaattggtttaaatcaattacgtttgacaatggttctgagtttgcggatatgaccaaaatcaaaggatgtcagatctactttgctcatccatattctccttgggaaagaggcacaaatgagaactgcaatggacttctgcgtcaattcttccctaagggcaaaagcatgaaagataagtcagctgcttatgttcaacaggcaactgatgccattaaccgcaaacatcgtcgaatcctccaatatcacacagcagaagaactcttcaagcaatacgttccttcatagcctaactgttgcacttaatttgacaattcaggaataacttatttttttgcgaaagatagcataacaggctaagatgtatacaaattgaaataattatggaggaaaaatatggcgataccaaacagaaatgaagtcccagaagaacttaagtgggacttgacccgaatttttaaaaatgatgaagaatgggaacaggcctatgcagcggcccaagaaaaaatcgaccaacttggtgaattaaaaggtacattagcaaaatctggcaaagatttgtacgaaggcttaactaagattctggccgttaagcgcgaggtggaaaatatttatgtttatgccaccatgtctagcgatgtggatactgccaattcacattatttaggctatgtcagccgggtgcaaagcttagctaaccaattcgaagccgctactagttttattaacccagaaatcttgagcatccctagtgataaactagctgaatttaagcaagctgagccaagactaaagaattatgctcactacttggaaatgattactaataagcgacctcataccctgccagctgaacaagaaaagttaatcgctgatgctggagatgctttaggcgtttccgaaaatacttttaacgttttaactaactctgacatggaatacggctacgtccaagatgacgatggcaacatggaacaactatctgacggtttgtactcattattaattcaatcgcaaaaccgtgacgtcagaaaaggtgccttcgacactctctatgctacgtacagccaattccagaattcgctggcttcaaccttgtccggcgtagtgaaaaaacacaactataacgctaaagcgcacaaatatgactctgcccgtcaagcagcactggctgaaaacggcgtacctgaagcagtttacgatactttaattcaagaagttgattctcaccttgacctgctccatcgttacgttgccttgcgcaagaaaattttaggcttaaaagatttgcaaatgtgggacatgtacgtgccgctaactgggaagccttctctttcttataactttgaagaagctaaggaagttgctaaaaaggcattgaagcctttgggcgaagactacttgaagcatgttgactatatttttaataatcgtgtcatcgacccaatagaatctaaaaacaaggtaactggtgcctactccggtggtgcttatgataccgatccttatgagttgctcaactgggaagataacatcgattcactttatactttagtccacgaaactggtcactccgttcactcctggtacactcgcaatactcaaccttacgtttacggcgactatccaatctttgtggctgaaattgcttcaactactaatgaaaatattttgaccgaatatttcttagaccacattaccgatcctaagacgcgggcctttatcttaaattactaccttgattcatttaaaggcactttattccgtcaaactcaatttgccgtgtttgaacaattcttgcacgaagccgatgctaatggagaaccactgaccgctgacactttagacgacgtttacggtcaaattaatcagcattattacggcgatagcgttgaaccaggcggcgatattgcccttgaatggtcacgaattccacacttctactacaatttctatgtgtaccaatatgcgactggctttgcggctgcaacagcattagcaaacaaggtggttcatggaacgcctgctgagagggatgcctaccttggctttcttaaagctggttcaagtgattacccaactgagatcatgaagcgtgctggcgtagacatgactaagcctgactacttagaagatgccttcaagacttttgaaaaacggttgaacgaatttgaaagcttgattgagaaataaataatcgcgctcatataaaaaatcgatatcatttcgtaagatttgatatcgatttttttgttgatgatacttatttttatttaaattgaacctgttagacctgcatcccgccatttattggaattttcgtttaactttagctgtaattcagttaatggttgaggcagcttgaaattatgtgacaatgaataattattcagatcacgtttcaagtcaaagactaccttttcaatattaactccctgctccaaattacttaaagcgtgattgattagctctactgctgcgctatcttcgacaaccttttgttttacaccgactagaagtgatttcaactcttttgcgttttccatatcgttctcctatcacgctcatataaaaataatcggtatcattttagcatatttgataccgattatttttatcgattttaattacttaattccaaaaatctacgattaattgtataaatacaaattaacattaaaattacaatcagtgttgccaccaataccgtcaatttaattttagaagtaccataatctgtgctcaatatcttaggtgaaaagtcctgtaaaaagtgtactaccatacaccaaattaatccattggaccacactcttagataactaaggaataaccccatacccaatgtaataatcacttgaccaacagttgaaattaatgattgactagttaaattatttaaatgatataagccgaacagaattgaacatacaatagatgtccataagatatcatatttttctttacgaaaaactagcaagaaagtattaaataaaatccctctaaataaaaattcctcacagattgcgggcaatatcgcagctaaagccgctaccattatttgatacagaggcaacttaaataataatattttatcttttaatgctccaaaaagtattaaggccaaaaagacacagtagatgatcatcattacttttgatattccttgcaattttagcctttgattaaaagtcttagtcgttaaaataaaatgctcggctacatatgcaaaagcgactataaagatgattacaatcaaccacttggttatcatgttgcctacaattaaatgtggcaacacaaatgaacctattaaaagaatgattgcaagtataaatagatttctgattgttttattgacttcagccttattactaaattctacttcatcggctaatgccaagtaatatttattattcaatgtttcaccctaatacttttatatgaaataataaggctaataaattctaattaaatttattagccttattacttataactttcaaacgttccaaatactaataggtctcatcgaactattcagcatttgactaacatttcgtagagttctcccaaaattgcgaccagcatagtaattacgagagtgtcctttaccacctatagtattttttaattgatctaacgtcaattcttccattttaatactttctttttatttacctgctaagccatcacgaaggcctgacataaactgacttacgcccctttgtacatttctccaccaagagcttttaccacgaccacctacaatattttgtaattcagcagtacttagtttttgaaaattattcatttctatacctccaatactaattagcaaatttctttaccgataattattcatttcgttttcttgacttgaaaataaagttaataatgtcaactgtatctacaatcaatgcaacaactgctacaattgctgctacccaagtaccaatttgagtcttgggagtataaaaccaagtcacaagaaaagaaatatttactaataacattaaatagtctttcatttttctcctaccaagttgatatcgattaacctttcatcttattactttaaaagctaccttgtttacgtcagcttaatcagtttcctagttctaaatatatagtccaagaataacgcccctgaaatttgacttataatcgaaatacgcgaggatgcgttcactaataaaatgtatcaaatcaaacaataacatgtttaaaggatattatattgataaaaaattaaagcaacgatatccaataaaacacttctaaacaaaagttttttatagagaagagcagttaaatttctcaaaactactaaaataaagaatattatcttatacttttgcctataacttaaattttatcccaaaaagtggctgataatcttagctccagtccaaataacatttgcaaccgttcctgcagccctaatatttctaccagtaccacgaccattgtagtagtttcgagagtgactacctcctacaacacttactaatttgtttgaatttaacttttcaaaattaacagtactttccattttgatacctccgataaatctttaagcctgcctcacttagtacctctaagtaccttatcaacttacatatataactttaccagaatagtggtattttctatgacattgtcataagttagcaacatccacatcatattctgctaaagtacataatttgatccaaaactgcctactatatgagtttcaatcatcgacatctcactaattttacttagaatttagcaatttagacttaatataattaaagtaactagcttttcctgtaataattgacactttaccttgcatcccataccgcaaaaactttctttctgacttggtagtcttaagcatagtctctacttcaaacatgctcatccctttttgttggacaggataagtacctatactaataattttcccattaagtatctcagacattccttgcttattctcaatctgaaatctcacttgttgtcctttattaagtacagcaacttcagaactagggacatatgttactactctcagttttctcctattttttatatctggcatagcaacactatctttgttatccaaatggacaatagcattatcttttaatactctttttttaccattagctaaggtgagattaatcccctttgacagtttttgcccctctctatatgctctattctgcaaagataatacatgatctggcgtgataacacccatactattaaccacattttcatgtacagcaaagaaagatcccaaaaataatagaattactaaaataaaggctggcaaaattatcatcgtggaaaagttgcgaaacttataggaatagaacttactactttccaaatcttgatcactcattaatatcacctaacttttcaccaaattgtaataatagccacgctttttcattaattcgttatgattaccttgttctacaacttgaccttgattcaataccacaatattgtcagttctctcagcaatagctaaacgatgcgcaataaatataacagttttattctttaacctaattaaattatcaaccacttttttctcagtaattgtatcaagcccacttgttgcttcatcaaaaatcaataccttagcaggtgaaagtaaggccctagcaattgttaatctttgcttctgaccacctgacaaaatcttagcattttcatctaattgtgtattaaatcctaatggcaatttttcaatgtcattctttatctccgcgatttggcaagcttcttctatctctttttcagttatattcttacgacttcccaacaaaagattctctttaatggtacctgcaaaaatatatggagtttgtggcacataattcacatatgagcgtaaaacatgcttatttatacttctagtcgaatgaccattaaaagttacttttccttttgtgggactgaaaaaatcaaccaacaatttaaccatagttgacttacctgatccactcattcccacaatagttaatttctcattatctttgatcgtcaaattaatatcttttaagacatcttcaccatatccataacgataatcgacatgtgagaaattaatgtctccatttaaatcatgactatcattaactgaagttttgcccttaaattcactttgaactaaataaacttcatttaaacgattctgagctacatttgcagcttgaagtgtaggttgcaagttaataatattttgtaatggatcaataaaatatgataataatgcattaaatgccatcaattcaccaatagacatttgattatgcattacaacacttgcccccacccaaagaataatgacattcagtgataatctaataaaagttttcaaagcagtttgaaaagcttctgttttgctatacttaaaagctttttttaaataatcaacaaactgactatcaatttttcgataacgtacttgttcactgtttaatgctttaatcgtctcaattccttgaatatcttcaataattgatgaactaactaccgcattactttccatctggtcattatttaatctttcaaacctttttgaaaagccgagaataacaatagcatagagtggtaatgaagctagcgtaatcaaaaacaatgtcatgttttgaaccgccaaaattatacccattaaaattacaattgaaagatcaaggaataatgaaatcaccgtacttgccaatgcatctataattctacttgcatcagaaaaacgagaagtaatctcaccagtttttctggtagtaaaaaattccatcggtaattcaaaaatatgcttaatgtattgtaaattaagatcgattgataaccgctgccccaaaacattcaataaaaattgctgaccatatgaaaaaattgagttaaagacatatgcaatcaataacccaatagctaaaacagataacgtggtaaatgtaccgttaggaatatatgtatcaatcaacccttgtacaaaatatgagctacagatactaatcagtgtcatcagcaaagcagctaaaataatgtttctaactaactttttctgtttaaacatataagggaataatgataatagattattctttttctcctttacaggcttaaaatctgccttaggcaccataaacaatgtaatacctgtccactctttttcaaacgcctttttggacatttttttaattccactagtaggatcaggatcggctacgattatttttcttttagtacttttaagaactacataataatgtaacaatcctccatcttttatcacatgaacaataaaaggatattgaatatctttcatattgaataaggacatatctgcttttaccgcttgaacatccatattgaatttttccgcagttttaactaatcctaaagcagtagttccttcagtattggttttagcaatatgacgtaaatgtgctattgatacttgagaatgataattctttaagatcattgctaaacaagctgcaccacagtctgtttcatcgatttgtggaacataaattgatttatacgttaacatgcccatcatttatctctttctgcttagctaatttctctgttttataattatatctagcaagaaaatctttcatcattttcacactactacgtgaaaaatcttcaacatccccattaacaaatgagacacgatgctgtttcaaatcaatcgactcaatgttcttcggattcaccaaacaagactggttaatcttctctaacataggattttctttagcatattgattaatactacctaaaagttgcatttcacctgtcgtcaagatcattaataacttgtgcggggttatagttgttgaaatataaataatatcatcaatattgacattcctagtttgacgtccaattttatacgaaaaagtcattttcttcatataattgaatttgtgtaagttgtagatagctacttctacagtctttaccatcatctgtctaaatttatccaaatcagatgtttttacaatgtagtcaattggacctaatcgtcttctgaatgtaattaatgataagtctgcatgactagttacaaagataatttgagctcgttcatctcgctttttaattaaggcagccagatcaaagccagtatcttcttccgtatcaccgcctaattcaacatcaagaaagtagataccaccatctaatttatgtttcttcagataatcaattgcacccatgtaatcagttgcagatgcaattgaaaattcaatttcttcatcatctgacaaaatcatttccgcagcaccaagaattttcttagtttgctcaatttgattttgatcatcatcacaaataaatactggatattgcattttttatttttcagtcccactttcactatcaggcaaaattgttaaatcaaaagtaaaccacccatcatcaacatagtaattaacaatcattgaatcttcatatttatgagtaatttcttttacattcgctagtcctaaacccatatgatgtttcttggttgtataattcttttgacttattttatctgtcgctactccactttttctaacgcgatttcgaatttcaaactcgaaatcgccgttttcttgataatacattgcatctattcgcgcactattagagttacctgtttctttgatcaaggcctgactttcttctgcagcattatcaaacgtgataccaattattctgaccagatctaaaatattaacactatcaggaattcgagaaatgtcgtgttcacaatcgaaactataatctagacctaaactataaagtttagacaacttagcaattgcgatacttttcaagttcttctcatggatatgatttacaccattatatttacgcaaagcctttttattaaattgcgtttcagtatactgatcaagtatttttacaacttctgcagtattaccttcttgagcacttacttttaagccatttaaaatattttgatagtcgtgtttgaaacgatgcaaatcatcttcatttttatcaagataatttgaatattcctgtaattgttccatctcagaactcaattgctgctgtttaagaatcagttccttattttctgcttcttttgcttttctatcagcatttgctagttcaagctgaaatttttgctctttttgttcttgtttagttagaaggcctttttgcactttaatgatagctatataagtaattacagagaaaactatctgaagcactaataaactcaaagacacttcaaaaactatagtcatatgtgtacttttcaatgctaaaaaatacacaatagagcttgataaataaacgtaaaatattaatccaataaaaatcgaactatttcgatcatttagtaacttacgaatttttaaataatacttttgaattataactataattacgaattccactagcaaaaatacaaaagtcatgctactagaactaatatcaaaaattaatagtattatttcagcactaattgtgagactgtaaaatagtttgtgtaaggatgaataattccttaaattaatttcttaaaacattagaaaaaggagttcctttctcgtatgattggtttgaacaaaaaaacacatacagaaagaagaactccagcaagcagttaatgacctattagaagctgaactgactgcgtttttaggctatgatccttatgccagagctggctggaatacaggcaattcacgcaatggtgcttattttcgcaaggttgatacgcaatttggcgagattgaaattcaggtgcctagggatcgaaacggcatgtttcatcagcacacgctccctgactacaagcagcactccaatgtcttggaaagcatgattatcaaactatattccaaaggcgtaaccactagagaaatagccgacttgattgaaaagatgtatggcagtcattacagcccagctcaggtctctaacatctccaagcagatgattccaaaagtcgaggcctatcatcagcgcaaactcagtgacaagttcttctgcgtttatttggacgctacctacattcctttgcgccgagaaacgtttgagcgtgaagcagtctatattgccattggcatcaagcctaatggtcacaaggaagtcatcgattaccgcattgctcccagcgaaaacgtcgagaattggacggaaatgtttcaagacatgaagtctcgcggtctagaacaagtttagctctttctttcagatggcgttgtgggcatgaagacagtgctggagcagacttatccgaaagctcattttcaacgctgtctagttcatgtcatgcgcaatatttgcgctaaagtatgcgtagatgatcgcgaaacgatcatgaatgaattcaagcaaattcatcaacagccaaataaggaagccgcgatcaaagtcttgcacgctttctatgacaagtggaacagagcgtacaaccatgtcatcagaaatctcaaagagattgaacctgatctgctggtcttttacagctatcctaagcagatcagggcttcaatttactctaccaatatgatcgaatcctttaacaacgttatcaagcgtaaagctaagcctaaagcagagtttccaactgaacagtcgcttaatacttttattggcattcaggcaatgagctacaatgaccgttatttcaatcgaatccacaaaggctttgatcaggttcaggataccttagaatccaattttgattacagatcaagactggatttttgttgtatcactatttcaatttcataaaacaatggatataaaaaaataatgtgtgaacttatgaaagataagtattatttggcattagctgatgaagttgaactagataataaggataatgtgaaaaaagcagtaattggattaatcatactggaagtagtgcttcagctatgttatcagctttacccagtcttattaaatctattgggtaaaaatcagcgcgttatggcaacggttatcttagtagcgtacgttacagtttttgctgtggttgctaaacattttagtttcactactagggtatttaatttttagttatttgcacatttggaccaatggcttgacttggtgtataatcttccactttttgcaagatttttctccacagttggcaaaagcggatttgggcaatcctaatattgctggagtaattatgatgaatgttccagtaataattattatgctaatatgtatttatgctttcaatagcagatatttgaagttgaatgaatagtaagtaaatataattattgacaaaataaaagctgataattcacgtaaaaatgaattatcagctttttgattatacagtcaaaattttattcaactacatgtctttcaaatgggtcatcagaaatgccttcagccaaaatatctcttgaccattgcttagctgagaataatgagtggtcgcgataattaccacaagattcaattgtcgttcctggtacgtcttcccatttaatgttgtcacggatttcttctaatgactccttaagtgccttggcaacttcagtagttgatggggtgccccaaactaaaagatggaagccagtccgacagccaaatggtgaacagtcaatgtagccgtcgatgcggtcacgtaaaagaccggctaaaaggtgttcaatcgtgtgcaagccgccagtaggaatggcgttcttattaggttgaactaaacgcaaatcgaagttgctaatctggtcacctttttggcctttttcaacagtgattaaacgaacgtaaggtgccttaactttagtatgatctaattcaaaactttcaacttttcccatgatttttttctcctttgtctaaatctatttatctttattttaactagttaattgccatttagctccaaacttgcttggcagtgtcgacaaccaacttgatcttttgccactggtcattttcggttaacgtgttgccttcttcagttgaggcgaagccacactgtgtgcttaaagcgagactatttagtgggtggaattcagcagcttctttaattctagcgattaatttttgtggatcttctaattctgcttttttactagttactaaacctaagacaacaagtttgtcgttaggaatttgtgcaattgggtcaaaactgccagatctatcattgtcaaattcaagataaaaggcgtcaacattttccttagcaaaaacatagtccgctactagaccataacctccttgggctgcccaagttgagtgatagttaccgcgacaaatatgagttgatattcgcaaatctgttggcaaatctttgattgcatcattgttaagcttcaagtattttcttttaaggtcgtctaatgaaaagtcatcttgtaaatgacttttccaatagcgcttatctacaatcataccccaagtacagtcatcgagtttaatgtcgcgacatcctgcatcgtataaggctaaaattaagtctcggtatgctttagaaatatcggtgagtaaatcttcttctgagctataaatctttttaagcgcggcaatattttcttctccacgaacaagttctgcgtaaaattgtgcgggagctggaatactttgccgtggaattacgttagcgccagtttcatcgacaacttttttcaggtattcaaatgatgaaagatctggatgtttaccagtaaatttgattttaccttcaacttgggcagagtcgttacgagtttcttcatcatggaagaaatagccgtgggcctgcttagtgtgtttaatacccccaaagccccagaaagtatcgaggtgccagtaacttcttctaaattcaccatcagttacgattttaagaccatgatcaatctctttttgaactaattctctgatctctttattttcaacatgagttaattcttcttgcttaatctttccttcttcaaattctgcgcgagccttttttaattctgcaggtcttaaaaagctaccaacgatatcgtaatgtaattctgtcataatttttctccttagttttgcttcgatgttttatttaacgatgaaaagtccgatgatgatcaagatcaaccagacaatagtgcacattcggttgaatgcctttttactgatgatgatttgtgaacttgtagttttgataggtttatccattgtctggctcctttctgaaaaattaaataagcaaaataaaaagcgcccttagcatagaatttctatgctagggacgcctaagcgtgttacccccaaaattcaagttagcttcacaactaactccttactaagtgctcccaaaattgggaatactcggacggggtaacgatcgtcactcgtaaattgcttacttaatagcttgctctttaaaatagctccaagaccatattcgttactatcgactacataggcttgcaccaactccgactctctgcagaagtcttaagtaattactcatctcttctaagcttttattaatttaattgtcattataatacgacgatgaaaagaagaagtcaaggaaatttttgaaaaatcaggatcattaacaaataatcggtatcaaatctcacgaaatgataccgattatgttaatgctagtttttataaatacaaatttattggtaaaaatgtaaaacatactttacattttgcaaatatgggcttaatatcaaactattaaaagaaagggatgtgtaaaatgtcaaaatttgaaatattaaaattaatggcttttgcaagcttgtttgcagttatgactttcatcttagtcgttgtattcgtgggaaatcgtcgtgcggcaaagtatgatgaacgacaggaattgattcgtggtcgtggtgacaggtatggctttcttgtgttaatcgttggagaagtaatttctgctttattcatgcagacggatttttatacaaagcatggtattgctgttaactttgcaattattatgttgtcattaacggtgatgtcagtttagagactgtaaaatagtttgtgtaaggatgaatatttccttaattttatttccctgaatattagaaaaaggaatccttttccggtatgattgatttgaacgaaaaacatactagaaaagagattccttcatgaatgattttaccaaaaatatgacacaagctctattcaatcaagacaaaataaacgatttattgcgtaaagaactccaacaagcagttaatgatctattagaagctgaattaaccgcatttttaggttatgatccttatgatagagctggttggaataccggtaattctcgcaatggtgcttatttccgtaaagttgatacacaatttggcgagattgaaattcaggtgcctagggaccgcaacggcatgtttcatcagcacacgctgcctgactacaagcagcactcggatatcttggaaagcatgattatcaagctttactccaagggcgtgaccaccagggaaatagccgatctaattgaaaagatgtatggcagccattacagtccagctcaggtatcaaatatttccaagcagatgattccaaaggttgaggcttaccacaaacgcaagctaagcgacaagtttttctgcgtctatttggatgcgacataccttcctttgcgccgagaaacatttgagcgtgaagcagtctatattgccattggcatcaagcctaatgggcacaaggaggtcattgactactgcattgcgcctagcgagaacattgaagtctggacagatatgcttcaaaacatgaaatcccgaggcttaaagcaagttgagctttttctttctgatggtgttgttggcatgaaaacagccttggccaggacttatcctaaagctcattttcaacgctgtttggttcatgtcatgcgcaatatctgcgctaaagtacgcgtcgacgatcgtgaaaagatcatgaacgaattcaaacaggtgcatcaacagacaaacaaagaagaagccacagctgtcctgcatgacttctataccaaatggggcaaggtttacagccatgttatcagaagcttgaaagacatagaaccagatctgctggtcttttataactatcccaagcagatcagagcttcaatttattcgactaacatgattgaatcatttaacaatgtgatcaagcgcaaagctaagcctaaagcagagtttacaaatgaacagtcgcttgatacttttattggcattcaagcaatgagctacaacgaacgctatttcaatcgaatccacaaaggctttggtcaggttcaggataccttagaatcctactttgattaaataaaagattaaaaaatcaatctacgagaaaaatctatttacacaaaagatttgacagtttctcagtttacgatatagtccatggagcatattttgcatttaatgaagagcatgttaaggcaaatagttggctatatgttgtacttggtatttgcttgattctaggatatattgatgactttaacagtgcgctgaacattatggggatttattggttgattattggagtagtaagcctgtttcaactccatcgtgataaggaaagtgataaggattgaaaaatttaaaaatgaaggctgcacgagtcggtaaagacttaacgcaagaagatttggcgcagcagattgatgtttcaagacagacaatttctgcgattgagaagggaaattataatccctcgattaacttatgtatcaaaatttgtcaggcgctggataaaacgttggatgatcttttttggccggagggatagtactcgtacaatatcgatcattttttgcaaaatatgatcaaaatggtgcaagatttgatgagctgatttttgataaacagaataggtttatgatttttctataataatttttaagtaaaggagaggaagatcatgcgaaaattgtcgacttcgattctagaaaaaattgttggaggacggtcaaaaattagacggcatttcttcaagagtaattctcggggatggggaaatggttctggtggaggaacattttaaatgaaaatgcagaatatgatttgaatggtgcaaaatttgacgactttagttgtgagattatgtgtgtagtaacattaatagtgtaaaaattgttagttaattgaaaggaaatttgaattatgaaaaagttgaatgaaaaggaattagttgaagttaagggtggatttgctgatcctacagttagtttttttgctcttaacgatatcacaataaataaaaaacatagaaatcattttaactggaagaaaatttttggattaaaatagaaaatgttttttcaagctttattttctcctgtaattgatttgtatattttttatcgattgtcaggctggaagtttaagagagaagattatgcattttcgatagtttttattggaacatgcgtattagctggtagtgtagtacaaatagatgattttttagtagatattattcaagcgtttttaatattccttttttcatatttggtaaaaaaagagaaaaaagtaaaatttatttttggggcaattttattttttgaattattagatcttcttataacaattaggaaactgtcaaatcttttgtgtaaatagatctttctcgtaaattgattttttaattatttatttaatcaaagtaggattctaaggtgtcctgaacctgaccaaagcctttatgaattcgattgaaataacggtcattgtagctcattgcctgaatgccaataaaagcatcaagcgactgttcagttggaaactctgccttaggcttagctttgcgcttgatcacattgttaaatgattcaatcatgttagtcgaataaattgaagctctgatctgcttgggatagttataaaagaccagcagatctggttctatgtctttcaagcttctgataacatggctgtaaaccttgccccatttggtatagaagtcatgcaggacagctgtggcttcttctttgtttgtctgttgatgcacctgtttgaattcgttcatgatcttttcacgatcgtcgacgcgtactttagcgcagatattgcgcatgacatgaaccaaacagcgttgaaaatgagctttaggataagtcctggccaaggctgttttcatgccaacaacaccatcagaaagaaaaagctcaacttgctttaagcctcgggatttcatgttttgaagcatatctgtccagacttcaatgttctcgctaggtgcaatgcagtagtcaatgacctccttgtgcccattaggcttgatgccaatggcaatatagactgcttcacgctcaaatgtttctcggcgcaaaggaaggtatgtcgcatccaaatagacgcagaaaaacttgtcgcttagcttgcgtttgtggtaagcctcaacctttggaatcatctgcttggaaatatttgatacctgagctggactgtaatggctgccatacatcttttcaattagatcggctatttccctggtggtcacgcccttggagtaaagcttgataatcatgctttccaagatatccgagtgctgcttgtagtcaggcagcgtgtgctgatgaaattgaccgttgcgatcccgaggcacttgcacttcaattgggccaaattgcgtatcaactttgcggaaataagcaccatttctagagttgccagtattccagccatttctggcatagggatcatagcccagaaaggcggtcaattcagcttctaacaagttattaacagcctgttgtagctctttgcgcaataaatcatttattttgtctggattgaatagagcttgagcaaaatctttggtaaaatcattcatgaaggagttcttctttctgtatgtgtttttttgttcaaaccaatcatacgagaaaggaactcctttttctaatgtttaaagaaataaatttaaggaatcattcatccttacacaaactattttacagtctcaaaaagcttgttagctttactctttctacttattttgaaataaaagaaaatacttaagatttccaacaaatctgacacaaattcatttatatatccacttgcatcccctaaggataaggctacaaataaaatgataagaaaaatatccgcatatttatatttttgtcttgcaacttgataaaagatccataaatcaaataaaggtgatacaacagcttgtgttaataaaagccacattagaacttcctactttagatgtaacatccacttaattaaattgtgtctatgcttacttgtaaagttagtaacacataaaaaactaacagtaggatcagcaaatccacccttaacttcaactaattctttttcatttaacttcttcacttaaacttcccacacgcagaatcgctccttttattgtgattctgcgttttttaacaaatataaaaggcacatgaccttttcattgctataattaaagtgaccaaacgataattctatgcatgaaaggcttgtgccaatgtctattttaccatctcctgaccaacaaaatgaacaactattttcaaactcaatcatcagcttcatcaagaagtttcaggtgatcaagctgttgagaaaatgtggcttccgcaaggaaaaaggcattagcctgttcagcttgtttctttacgttttaagcaatgtctttcgtgaccgcagcttatatatgcagctgaaaacggatcattttaaagaaagcttttctaaaaaattcttattaccgatttatgcgcaacgtccacgtcaattggctccacttcaccacactgctttctgcgcaaatcattaataaccacttgcgatctttgacttcagaaaaacgggctgattgctttgttgtcgatgattcctacttctctaggaccggcttcaagaaaacagaattagtcgccaaagtttttgaccatgtatcaatgacttacaagaaaggttttcgcatgatgaccctgggctggactgatggagcttctttcatgccaatcaattcggtgttgctgtcctctcacaagctacagaatatgattggcgaaaacaaagtctgtgatcagcgcaccattgctggcaaaagacgcatgcttgcccggactaaaggcacagacgtgatggttaatttaatcgaccaagctatgaaagcaggtcatcaagccaagtacgtgctgtttgacagctggttctcaaatccacatcaaatcgtccagctcaagcaaaggaagctggatgtaattgccatggttaaagttagctccaaaatcaaatatgaatttgaaggagaacgcaaaaacatcaaacagatttatcgtagctgtaaaaagcgacgcgggcgttcgcgctatatgttgtcaattccagtcaaggttggccgccaagacaaagacggtgctaaaattgacgctcggataatttgcgttagaaaccgtgccaatcgtaaagagtggctggctattatttgtaccgacatgtcgcttagcgaagatgaagtcattcgcaattatggcaaacgctgggatattgaagtttttttcaaaacctgcaaaagctacctaaaactaagcacggaatatcatggtctgtcctacgatgccttgactgctcatgtggctatagtctttacccgctatatgctcatgtcagtagccaagcgggacgacgaagatgagcgaaccttaggtgagcttttctattgcatgattgatgagctggcggatattacattcagtcattcacttcagctaatcacaaaagcaatggtggctagcgttgaaaaagtctttcatgccagtgaagcacaaatagcagaattcacggctgactttatcaatcgtttacccaaatacatgcaaaaattgttaaagaaaactagcaaaaatagtatagaagcccaaagctaagcaatatcaaagaattgccagcttatttgatgtgggaagtttaagttcttcataattcaaatcttcctttcaactctttaactttttacatcaccaatattactatgcattcaattttatacacaaagtcgtcatattctgtactattttaatcatattctgcatttttatttaaaaagcacctccaccagaaccatttccataaccatacgaattatttttaaagacgcggcgtctaatttttgatcttccaccaacaactttcttcaagactagaatagatagtttttgcataatttttcctctctttttctcaaaaaatactatagaaaaacatacacccatttggactccaaaaaacatttcatcatattctgcctcatttcaatcatattttgcaaaacatcaagttactcaatatgagacgcttctttcaattttatttaaaagatcactacttcgagtcctccatcttttcggtatcattttagctcatttgataccgctaaattaataatgataccgattaaatactaaaaaagactgacaattcatttttacgtggattatcagcctttttgattactcatgataaatatcttgaaccgccataccccaatatggaatatattccatatatcttttacttgcattcttatcatatggttttattaaatacgcttctaaacttgatgcaattgccttagatacttgagaagcatctttatctgataaattaaatgttttacgaattgaagagttactaatcttcatgtcatttacatatttcaaactagcatcccagtaaattgattcattcttttcagtaatagccaattcactaaatgctttttcctcacgaatagttacttgcgtagcagtggtacccttgcttaaaatttcgaccgttggtaaatgagcctcttctaatgaataaaccactttatcaattccagtaccacgtgattcagtaatatgaaatttacttaagatattagccaattcaggattacgggatcgaggtgggacgtctaaaaatctaagtggttcaatcaaaggaattcctggtgctgtgcttgctggtagtattgatttatcatgtttgaattttttaagacaccattatatacaaatttccagcaccaaaatcagaagatgtcgtcactgctatcttatgccagctaacattgccattcattggttgaggaacttggctctgtatcacctcagaaaaatccttaatttgatgtagattcaactcatttttacgtgaattatcagcttttatttatatctaaatcattcctgcaattaaaccaactacatataagaagacacagcaaactactaaatacaaaccgccccacttcacggtctctttcagtatttcgccttcatcaccttcgcggttaattgaaccagttgccacggcaatattttgcggcgacagcatccctgccgttgcgccagtcatgttcgatgctacaacccagtacttacttacacctaggtccattgcagccgacagttgtaaatttccaaagagaacgttagctgaagtggcagaaccagttaagaatgttcctaatgccccaataagtggtgcaaataatggataagctggccctaataagctaactaaggccactgctaatgcatcggtcattcctgcatagaccattactttggctaatcctacaattgcacaaaccgtaattgttgtcttccagacgctcttaattacttgtcctaaaatttgcatcattttcttaaaactaacgccctgaattgccccaccgattaaagtagcgacaaaaagcaatgtacctggagacgacaaccagctaattgacaaggtattcggatttttccccgtataaacaaccaaattagttgtcaccttattaagtaaattattaactgctggcaccaatgatgatgcaaaaataacgaagatgaaaactaagataaatggtgaacatgccttgagcatttctttagtacttggtttttctacatcaggttcttcttcctcatcatgccatctagttaataaaatcgtaattgcgattgaacaaagtgccccaacgattgctggcaattctgctccaacaaacttagccgcaattacttgcgggattgccatgcctaaacctgacatcaaggtaattagtccaacgcctttaattgctttaatagaaccttccgttaaaattactaggataaatggcaccagcacaactaaaacaaataattgcaaggtcacgatgaaggataattcttcttgctttaacccagtcacttcacccaaggtaatgatcggcaagccaattgcaccaaaagctgtggccgtggtattagcaatcagactgattactgatgctctaattggctccaagccaaaggcaatcaaaatcccagcggcaatcgccaccgcggttccaaaaccagcaattgattccaaaaagccaccaaagccccaagcgataatcaaaacaataatccgcttgtctgttgaaatcgtcgccagcatatcttgaatggtcttcataccacctgattcggtagtaacattatacgcaaataaggccatcacaattacgaacatgatcggccaaatgcccatgataattccttctagcgccccacttgccgtatctagcaccggtaatttaaaactaaagactgctaacaccatcgtcaaaattaagccaatgacacaagcgcgtgcagctggcattcgcataactcccagcgaaataatcaaccaaacgatcggcaacaatgcgatcgcaaatctaatccacatcaaagtcctccatcatcaaaagtgttgtactatattatttaatcatgatttgggtaaaaagttaaaataagacacaaaattttagttaaaattacaattttcacaaatttcacttgcaagttttaacaacaaactatataacaattaatggaaagtaaaatttctcacatcatgtttgaactactccgtggaatagagtagttctttttttgcgtaaaaaaatagccagaccgaattcagcccaatgtcattaagttaagacattgaaaaattatcgacttggacttttaagatcattcatttgcgatttatcgcatttgaatgctcttttttcatgccaaataaacccaaatcttgtttagaaattaggctacacgatataaataatatacagctgatttgggtttgagatttcttttgtcttttcgtcctggtctgatcggaattgtgtaatgactaatttgaataagaatctttttaaagatttcagttgaagaagaaattatatacatagcctggatgacaaaacatgactgtttgaaattgatcgcatattgatacttgcattttttttgtggtacatatgcttgagcatcaatttgactgactgcgttaaacataatcatgtgggcatagatctccatttcaataaatctatcctgcttggaatgaaactgtacgctacctaaagcatatttcaactttttgaatgaagtttcaatgccccagcgcaaatggtagatttctttgatcctttttaagggataatcggctctatttagattagttagaacaactttccattcttctttgcctgatttaggatcattaattctaaatttacaggcacgaaattttattgtacataactctccaaagtcccagctgccatctttggtatttttagaccgatattttatatattgacggtaatgatggttaaccaaatgaacgttttctgtagccttatgggtttcataataataattagaggtagtcacccagcaagctatatccttatcacactcttgattaggcaactcagctacttccttaaatgcgccatatcccgttttagtacgtatgacataataacagttaggcaggcgattacaattttcaatcatgttaaagccggtataacctcgatccatagtaactatatatggtccgcaatttagctttttaagcatttgaatggcggctttacgttcatccatctttgacttaggctgaaagatgcagtcttgataagtattatttaacaggtcatagagtgcattaacatgaatttggcaatatggctttcctttatgattgagatttccaacgatattctctgatttaggattccagatttgattaaaatcagacccatcaatggcaaatatacgatatttatgatcaaataactggatattaaataaattctgattaaatacagttagaatatgcttaaaacatgcgggtgaaagctgacctttgcgttggacataagcggaagtactgactactttatcgttatttttaatagctttttggccaaaagctctaaacaactcactggtcaaatcttttccttgcatattaatagtagttttaatgactgtagctgcatctaaaaaccgcttcctagtgaaggcatgaggatcatcgataaaatcatgaatatgctttccagtatcattgataatttgatcaagacgatctaaaatatttctgtgaagggctttcataattaacaccagctttctggcaataattttgaaggtttaataatttaatcagagggcgaaaaggtaggttcttttcgcctttattttatgcaaaaaaaagaaccaaatcataatgattcggttctacagagattagattcaatttgtcaatgtcttaacttaatgacattggaattcagcctgacttctgttttttttagcgatgtttaattacgtgaataccataagcgattaagtaaattaccacttcgatcgttgcaataaagaaagttaccggccagttggtgataaagccgagatacagtccagcccacacgccaactaaagcgaaaaacacggaccaactgatcattgctggtattgttttaccaatatagcgcgccgttgaagatggcaatgttaatagaatgaagactagcaatgaaccaacaatctgggcaccgatagcaactgacatagccaaggctaccaagaaagcaataccaacccagccagtatgtacaccatgtgcaacggcaccgatatggtcaaatgagtcaaaattcaagcttcgagctaccaaaataattaatagtaaaactagaattgacaaaaccactagctgaatcacgccttgtttatcaacaccgatgatactaccaaacagaatattagtagcgtaacggctatttgatccagaaatggctaagaacagcacacctagcccaataaacagagctgagatcgcactaactgacgattctttttgatcgctgtgcaaggacaattctcctactccaattgaaccgagcaaggtaaatagtagcatcccccataacggtgcaatgccgataaagacggcaaaagctgctccagcaaagccgatttctgacagtgtgtgagctaaaaaagcataactccgtgctactacatatacaccgaccacgccacaggtaatcgcaatgaatgtactagctaagaaggcataacgcataaattcgtattgaaacattattcgaaatcctccttaaatttatccatctttccttgcctgatcgttcccttatttaaatatagataatcagtcatatactttttagctaaaggaatatcatgagtgacaaacaaaacggtaattttgtgttcacgattcaggtgcttgattaatcccatcaattcttccttagcagccggatctaggctagctgttgcttcatctaagatgatcatattgggatgatcaagtagagcctgcgctaaatatgcacgttgtttttgtccacctgatgcctcacccattcgggtattctgaatcttttctaaatgagtttcttctaactgatgatcaatctgttccttaacctttttggtcttaaacaatggggcgttaagtccaataaatgcgcgaatcgacaatggatactccgcatcaatatttctaaactggggtacataacctaacttaacgtctgaatcaaacttaaagttgcccgcagtcggctttaacatccccattaaaatcttaattaaggtggtcttccctgttccattaggtccaagtagtgcagtcattgacccgtcttcaagctgaaaactcaaatcttgaaaaacatctttagtatcaaatctcatcgagagatcatttacttctaaaatcactcttctaccccctccctaagttgctattatttttctattttagccaaattttgataattttctttcatccaagccaagtaagtagtgtggttaggaatagtctcccgcacatttaacactggaatattattttccttagctaattttacaaatgacttcacagttgaactgcttgcctgtgtattgttaacaaagaatgcaatcttttttgctttaatttcattattcatttgattaatcatcttaggactcggatcagtaccattctcaattgcttcttcaaagcccttatccccaatcttgtatcctgcttctcttaaagcataatcaaagacaggttcactaacaaagactggcttactatttttcttattagtcttcaccaattgcttaacttgattaatcttagctaaatacttgtcaccattagctttaaaataagctgcatgctttttatcaagcttagataaacgcttaactaggtaattaacatacttggttggcatacttagattgtaccaaatatgcggattatcccccttctttaatcccatcaagtcttcaccaactaagacaggctttttgctaacagaactagctagcttattcatccaagaatcatagcctaagccattagcaacaataatatttgccttggtcaattctttagcatctgccgtagttggttcaaaatcatgaggatcggtactgctattgctaatgattgccttagccgtaccatattttcctacaacatttttagcaatatctgcataaacattggtggtggtaatgatcgagactttacccgaattgctcgtcgaatttgatctattcgagcaagctgaaactaacagcgcaataacgccaattagtcccaaaaaagagattaacttcgtaattttagatttcgcattttgcataaaatatcctccttgtgcaaaataaaaaagcatttaagttagaaaattcagcataaattctaactaaaagttagaataatctagttaattacatatgtcaacatatttttgcatagacaaatagcaccagtctcccataagcctgatgctatcaataatttaagtcataaaattttgctgaattttattaaatgctttgttctaaaattacattattatataaacatatttttatataattgtcaaactaaattaaaattcttccttcacgtgctgacgcaaaacatctaagattttaatcacatgcttatcttctaagctataatagcgctcctgcctaacccgctcgctcttaactagcttagcctcttccaaaatacgcaagtgacgcgaaatagctggctgactaacatcaaactgcttaactaaattattaacactacttttttgattatcatttaaataatataggatttgaattcgaatcggatgattcaacgctctagtaatccgaataatttgctcgtccaatttcttcacccattcatactttttaatttattatagcttaaatttaggtataaaaaaacgctacccttcgggtagcgcaaaacataacagagtatcttgatttaagtagagatcatcaagatatttatattataatacgtttttgccaaaatgtattgttttttgattaataaccagaattatttaataataataatattcgatattacttatagtattattcgtttgggtcttctttgacattcttcttccagaaactcatgattaaaccagcaacgattgaaccaataatagtagctaggaagtagaataagatgtggcttggaccaccgatgttaccagcaagtggtgatacccaaagaccaccgtgaggagctgggacaccaacgtgccataaaccaactaaagcaccaccaacagctgaaccaatgatacatgatggaattacacgacctgggtcagcagcagcaaatggaatagcaccttcagtaatgaatgagaagcctaatacccagttagaaacacccgcacgacgttcttctacagtgtacttgttcttgaagaatgtagtaccaattgcagtagcaaatggtggaaccataccacccaccattacagcagccatcaagatagcagcagtagctgagtgagggtcgttagcaaatgcacctgaagcgaagacataagcagccttgttgaaaggaccacccatatcgattgacatcattccggcaaggatagtggtcaaaagtaccaagttaccagtacccattccgttcaagaaatgagtaatagcaaagttaatgccactaaagattgggttaatgatgtagaacataattgctgcaataaagagcaatcctaaaattggatagaacagcattggcttcataccttcaacagaacgaggtaatttagcaaatactttcttcaaaccaaccatcaagtaaccagcaataaaaccagcagcaataccgcctaagaagccggctggtgaagttgcgtgagcttgaacgttaacttggaattgaccgttaacaatagaggccatgtaaccaccaacaaaacctggcattaaggctggcaaatcaccgattgattcagcgatataggctgccaaaactggaaccatgaaggcaaatgccaagttaccagcattgtttaaaaagatgaaagcaggagtcttagcgccacccatgtagttttctacgatgaatgagatcgccattaagataccaccaccaataacgaatggaagcatgtgactaataccattcatcaagttcttgtagatacctgcccacaaacctggcttctcagttgatgaagattcagttgacttgtcttgagcacttgcacggtaaacatcagccttaccacccataatgtcatcaatcaattcgcctggcttgttaattccatcaacaacaggacggttaactaagtgcttgccgtcaaaacgtggcatatcaactttcttatcagaagcgataataacacctttagcacgcttgatttcatcaggagtcaacttatccttaaccccttctgaaccgttagtttcaattctaacttcgatgccgcgcttcttaccttccttaatcaaggcttcttgagccatgtaagtgtgggcaataccgttaatacatgcagtaacaccaacaatcaatggcttgttgtcgtcatcacttgtaccttgagccttagcagcttccttagccttcttagcttcagctgccttcttgtcttcttcgtcttttttagcttcagccttttcaaaaagatcgataacttcttcaggagtcttagtattcttcaaagcttcaactaaatcaggatcaattaacaaacctgaaagttttgctaatgcttgaaggtgagtattgtcagcaccatctggtgcagtaatcatgaagaataagtgaactggttgaccatcaagtgaattatagtcaattccttccttactcttggcgaataatacgcgtgccttgttaatagatttgttacgtgcgtgaggcatcgcaattccgccaccaataccagtagttgattcgttttcacgtgcccagattgacttaataaaagcatcttcgtcgttaacgatatcagttgctacttcaaggtcagccatttctttaatggcatcttctttgttcttagccttaagctccataatcatggagtcagggcttaaaatatccttgattctcatatttttcccctcgttttttattaagaaatttgctcaactttgatttgtggaagaacagcatcaatttggctcttaactgcaatgtccttagtaaaggcagtagcagcaccacaagccattccaattctgaagccttccttaggatcttgggtcttgtagtaagtaccaacgaagccggcaatcattgaatcacctgcaccaactgagttaacagcagtaccaacagcacccttagcatggtaaacatgatccttggtaagaaggaaaccaccttcaccagccatagaaaccatcacattttgagcacccttatctaaaagcttttgtgcgtattcaagcatcacatcacttgaatcaaaagttacgccaaacaagtctgctaattcatggtggttaggcttaattactagtggcttatatgccaaagtatcaagtaaagcttgtccagtagtatcaacaacaaattctgcacctgcttctttaatagtaggaagcaatgattgatagaaatcagttggaaggcttggagtaagagaaccgctcattactacaatgtcgcccttctttaaatcgtttaaacgatccttaaaagcagtgatttcttggtcggtaatgttaggaccagccgcgttaatttcagtttccttttcagcgtggatcttaacattcacacgagtgttatctgaaatagtaacgaaatcactttcaattctcttttgattcaattgacgaaccaattccttaccagtgaagccacctacgaagccccatgccgtattatcaacatttaattggttaaggatttgagaaacgttaattcccttaccccctgctaaaaatgaatcattgttagttctgttaacttctccgcggttaactttttctaattgaagaacatagtcaagcgctggattaacagttactgtataaatcatcctattttgcctcctctaattcaataccgactggtaatgaccgtttttgacctggttttagttgatcagttaccacaatcacgtcacttgtattggcaaacacagcaaagttacgctcaccgattttactattatcagttaatacataagcgtgtcttgcctgtttgatttcggctgccttaaccgcagcttcctctggatcaggtgtagttagattgccatttttttcaattccattagcaccaacgaagctagctgaaaaattcattgccttaatctgacttaaggcggtctgacctataacagcatgcgtatcgtccttaacttcaccgccaattagaattgtgttaattccgtgatttaaactgcataaagcagtctctacaccattagtaataatcttgacgttagcaacctctgctaaaaatggtaccatctcataagttgttgttcctgcatcaatgaagacattgtcacctggacgaacaaaattctgcacggcatatctagcaatagtgatttttgcgtcatgattcaaactgaagcgaacgttttgtgatacatcacgagaaaaatgtttaactgattgggcaccgccatgaacacgcttaaggatcccatttttttccatctgaattagatctcgacggatagttgattcagatgttgcggttaagtcacataattcacttacgcgacataactcgtgttgattaacatagtcttcgattaagctttggcgctcctgagtcagcatcatttctcacctcgataaatattgtattcgctttctcctccaaaatcaatcatttttcttcaaaaaatgtcatttttatttattatcgttcaataacattcatttatatgcaaaaaagatgccgttttttgattgaaacgacatcttttcttcgtcatttggaattattcttagtcgttttaccctatttgactaagaatccgtaaagatgactaagaaagagaaccaaagatctattaaccttgcaaaagcaaaacacgctgaatcattattgattcagcgcgttttactattaaatatattttgtctagcctctcaagctacgcttaaagttttgccatgggccgacatcatctgtttgcaaaatcaagtttggatagatttttctaatccagataaatgacgctactgtagcggctaaagcaattaaagcagagatagctgcctctaaattagttgcgttacccataattactctagctggcattacaaatgatgatagaaacgggatgtacgataatactttagcaaaaatcgtatccccacctgattgcatattgactgtgaacaagaacccgatcaacatcaatgtagatagtggtcccaccgctttgttggcattctcgcttttagcaaccaaagcgccacagaaagctgcaaagataataaacaataccaagccgattatcgtaaacaccaatccccaagaagccagattgccaattgcttgatcaatcatcggcttatactgtctaaataaatcgctaaagccatcgatgtatggggccgcgcaataaactgccacaaaaccaacaacataaattaacacttgggtgataatttcaccaaaaatacctaaaatcttcccagtgaaataatcgccacctggcatactcgaaaagattacttccattatcttggtacccttctccgtagcgatatcttgtgctgttacttgcgtataagtgatcacaagcatgtacaagataatcagcaaaacccagaaggaaatttgcttaacaggatcattatcaaagctcttcttatcaacatgcttaacttgttgcttaaattgcgctcgcgtagctaaagactgagtctgttttgtcgttagcttggccttacttaaattcaattgttgctgggcggtgtttaggctagttagcagctctgattttagatcactgtccattttttcatcactatagtaagttgcagctaattgattattcttttgttcaattaaaacatagccatcgatatcttcatctttatacgcctttttagccttagcttcagtgctatagttgtcaaagtcttctgactttttaattgcttgctttaaggcagaattagaagtaactaccccgacatagttgtcatcactgccgccagctgataccattccgataacaaatgaaaagaagacgagcagaaacggtgctaaaatcatcagcaaatatgaccaagttttcacttctctacggtaggtttcttttgcgacaagccagatcttattcatgacgcgcacctgctttcattttgaaaatctcgtctaaagttggaggttcctggtcaaaagtctggatatattgaccggccgaaagttggttaaaaatatccttaccatatttttcgtctgcaagaataagcagcttcattccattgttttgcaaaattatatcttttacacctggtaaggctgataattcagtagcacttttgtctgtcctgacaaaaattcgagttaggccaaagctgttcttaatttcatttactgggccattcaagacgatatgcccatcattgatcattacgacgtcatcgcacaattcttccacgttacgcatatcatgatcagaaaaaatgatcgtagcgccttttcttttttcttccaaaatcagctgcttcattagatcaacattaacaggatctagtccactgaatggttcatctaaaataatcaatttaggttgatgaattaaagttgcaatcatctgtactttttgttggttacctttagacaaagacttaatcttatccatggggatccctttaacagccaaacgtgataaccaatcaggcaattcttcttttacctttttagccggcatccctttaaggctagccaaaaacactacctgatctgaaatagttaacttaggcatcaaacttcgctcttcaggcagatagccaatattgtcataatctttagcgttgaaagaatgtccatcaatactaatctggccgtcataatcaacgaatttcaaaatactatgaaagatcgtcgacttacccgacccatttttaccaaccagtccaagaatacgcccatctgacacactgaagctaacatcaaacaaaacctgtgttgacccgaagcttttatttaggtgttctatttttaacataatttttcctcaactttttatctaatggttattagacctagaagtacaccgtcaaagaactgccataaagtatcggttgaaaaaattgtttttacaatatcaactgacccccaattggttactaaagtaatcactacaccagctgaagcaaccactactcctgtaccaataacttgaggggcaagtttcaacactttcttctgccatggaatctttgatgcgaccgttttattaaggactaagcttgcggacatgatgccaccaaacattagaccgaaagccaatccggctccaatcgacataataatttgaaaaggttgaggcgaaccagcagtcttaacatacatcatcacaagagctaatattggtccaacaagtgctccaattcccatgccttcaataattcgtttgttttcacgagcaaatttttcattattcattgttcttacctcaaggaaattttcagctaattaaacaaatccgaaaacttagtcggaatgttgttcttggcgaagtatttcttgaatgcatccccaaaactcaattgatctttttctctattttcaagcaaatcatgaacagctaagaatgctgtaacggcgtaattaacggctaaaatgattaacaaaccgagcacaatataaattaagtacagcattgttctttcctccaattcagcgattatctcccaggaaataatcttttatccttttaaattaatcatatccccatcatttatgtaaaaggtaaaaccgtccaattctgtcatttttcggactgattttgcattttattcttcatcttttttataaactaataaatcccctggttgacaatccaagacttcacagatcttgctcaacgtgtcgaagcgaacgccatgcgcctttcctgtcttcagaatcgacaggttagccggcgttataccaactttctctgccaactcctttgaagacatctttcgcttcaagagcataaaatctagtgtcacttcaatcatctatatcaacctttctaaataatcgagtctgcatcctcctgaaccttcattccgtacttgaataccaagtagactacgtatagtactgctaggaaaagcaaaccagttgtcacaccacttgggtatagtacattattcgaggatttagcgaaccaagtgcggtgagttatgaaaataatgtaatctattattgaaataagggtatatccagcaactgaaattaataatttcttgagtaaattcaaattactatcagcaaagtaaacttcttgcttgatattcttaacaattaatctggcatatcgacagattaaaaaggctgcaacgctcatcatgatcagtgatagcaacacaaccactattgcaccgatatagttatcaactgatacgccttttatacccctaccactttcaaagccagcacgaaaatccggattatgtataccaaataacacaacacctcccataacgatccacataattattcctatcacacaaaatatttggtaaatccaagcaaaaatcgtaagcaaattcaaaattaattttttcatttttctatcctctcaaaatatggatgattctgtatatagcactgccaattacacccgttactccaattactaataatgtaattctaagaacactccatgttccgcctaagttagcaaacactaagattgccatcattatcagcattccaataattgaacctatctgtcttttcttttctggaagcatatctatccctctcttccataaaactatctatctctttctcgtcttttataattattgtattacgataatttataattgcaatacagaaataaaatatttttttgggataataaaaaaataccaaattagtcgttaaactaacttggtattatgttttatcttccaagctactgctttttacttttcttcttatagtaagagttcatgaaaatattcataaagataacaaaggctacactttcaactatattccaaaatactgttccaaagcttaatgttttgtactgaaaatagtcccataccaatcctattaacagggccaaaataccagcgatgatacttctgtttctaacttggcgctcggttaaaattttatttttcataatttttaccccattattatcatatcgaaaaataggaaatctattaaccgaattttctattttttaatattatctatgtttatgttttttatgtctattttgtttggcgaaatctttaacagcgccttctacacatccttttatcataccacttccgctagggagcgcatcaatgaaacccgataaacatgatccacctacaccaagccagttagtgccaccacttactttttctaattctttataattcatttctttcatcataaaagttacctccttttttacaaatgtgatacacaagaaactgatccgctaataatacccacattagcaccaaatatagctccacctactgtaccaattggagtaccaaatgcagtgcctgcaatgccatattttagtccatccttcaacgctcccattccaatagctttagcacaatttgtgatttttctacggcgtcttgctttaccaccgttaccaccgaaaacagctgacagttcttcataagttaaagtttcaaatttgttcatgtttttcccctttataaaacttctaattacaattttcataagtgaattaagttttacctctcttcaacttacacactaataatacaaaacaatttaccttcattggcgtataataccgatttagcacgaaacaagatctatttggaaaatatttaccaaatcggccaagttttcgtatattagtaatttacaaaggattcttattaattgttacgctaacttgatattctgttttataaatccgaaaactagtaaaaacatagacacaatgcacttattatgagaatggctaacaaaaaaatcttctcatagccaaggctacaagaagattgccatcacattaatgcataaactgatacgcacgctctttactttaataaaacatgatcaattatacgactataacatagccactcaaaacccaaaacttgagtcgaaatcaaataatcatttttagcatagtaacctacgaaaaaaatcacaagtttcataggtttctttgcgttatcttctaagtattacgatattttctattggagatatttttagcctattcgcaccagtatttttttcaatacttatctactagttattatctacctctatgaaaagaactttggaaaaacttaggattttccaaataaacgtctcgtttatgattaccacctttcttactgtataaaggtagcatgtgttcagtatcagttagaccaatatcatctacagaacctgacccacctaaaattccgcttaaaagtacttcatctttagaaataatgattcgtttcatctacttttcctccttagttttctttcctaatgaaatgcccaaaactaaactgattaagatactaatcattccaattaattgaccccagatattatccttctcacctgtagatggtaaagactgagtagaaccatttttaatagtgtcattttccaatcgctttaacttagtaattctattttgattgttcttaacggcactataaggcttgctttgcacttttactgaatcaaattgtttattttctttcacacttccgtgtttttcactaactgctgctagaataatattctttttatgcgatttagctgttttcttgaccttagtggctacgattttaggttttactggcttcttcacagttttcttcttagtttcagctctaggagccgcatactcttgattacctgtcgtaactttagtcagatctgcagtagagctagcaacatttgcagcattctcaaatacgctattttcaacaaagtcagtaatagcaacgtcattgctagactgtgtttgatcatcttcagctacagtcacttcaggtatttcattactttcagattcagtagtattatcatccttcggttgatccttaattactgcctgttccactaatttattagctgcatcagaatacaaaaagttatataactcttgtcccgtcttttctccaccgacccatgcactaataatttttccattaataaatctcattgtagttggagtacctggaataccaatttctttgaaggcatactcatgtgctccttcttcagcatcaatattgaaataaagcagcttacctttaacgatttcattgaaatcttttaaatcaggtgaaaattgtcgacagtagtaacatgttggacgaccgatatacataagatgttcttgattatttttctctgctagaagatcttttacttcttgcatttttactctatgaaaatcttttacattgttctcataatcttcaacagatacctcatcttcatcatcttcactatcttcctcatttgcattattaggatcttgattattagtattctgtgactgattattttgatcttcagaagctgctggctcttcttcctgcttattttgagtttgagctgcttcgttcttactactagttttctgctcagattcggaaacatttttatcatcattttctgttttagatactacttcacttttattctcttgagaagtattaccttcatccgcatgcacaatagtactattcatcatcaataatactgctgggctcaacattaacattaatatttttttcttattcatagatcttcctccgtattttttataactaagaaaaatatatcaattatcagctatctttttggttatcagacttattcagtacactttttgaccaaatcagttatcaaaataattggaatttgattctaactaaaaaagagcttttcagctccttttaattttggttaagaattttatccttaaaatattcaaaatatgtactcttacctgtaataatagttgcgttgccttccatcccatatttcaaatttttcttggacttggccttacagattacttcatagacattatttccgcgtagattaatgggatatactccaatttctttcacttttcctactaatctatccattgttccactagcattagctacctgaaaatacagtgtttggcctttttttattgccccaattttattacctgggaaataagtaactacattgaccgttcttttagccttaatcatcggaaacaagtgaactgtattctcctgtttatcatcaagatgaactagccatttttctctatttcttctaacaatttgtccttcatgatagtttctattggcaatattaagtgtattttgtggttctacaattccggtagatgtaactgtactttgtctagttgcaaagaaagaaccgactattaagatcagaactaaaattgccataggaataataatcatagttgaaaaattcttgaatttataggaatagtattcggtactctcatagtctttattattcataacgttgctcctaattctcaactaagttatagtaaaagccatgtttctgcattaatttctcatgacttccttgctcaacaatttgaccatgatctacaaccagaatattgttagtcctttgtgcaattgctaaacgatgagcaataaaaataatagttttatcttttaatttcattaaattatctactacttttttctctgtaatcgtatcaagcccgctagtggcttcatcaaaaattaaaattttagccggtgacaataatgcacgtgcaatagttagcctttgcttttgcccaccggataaaatcttggcattttcatccatcttggtttcaaactgcagtggtaattgttcgatttcagactcaatttctgctatctgacaggctttcaatatatctttttctgtaatatctggtcgactacctaagagcagattttctttgattgttcctgagaagatgtatggtgtttggggaacatagtttacgtatgaccgtaagacatgcttatctactttagtagaattaaatccattaaaagttaacttgcctttgcttggagagaagaaatcaactaaaagtttgaccatagtagacttacctgagccactcatccctacgattgccaacttatcattgggttcgatttttaaattaatatcttttaatacatcgactccatagccataatgatagtcaacatgatgatattcaatctcacctgctaattgcttggcatccctaatctgagcatctttctggaactcactcttaaccatgtatacttcattcaatcgattttgtgctacattagctgattgtagagttggttgaagattaataatgctctgaagtggatctacaaaatacgatagtaatgcgttgaaggtcattaattgaccaatgctcatctgcccgttcattacaaccttagcccctacccagaggataattacattgagagataactgaatgaaggtctttaaagctgactgcaaagattcagttttactgtaacgaaaagatttcttgaggtaatcgacgaattgactatcaatcttacgataacgtgtttgttcgctatttaaagctttgattgtttcaattccttgaatatcttcaattactgaagaacttaagacagcattactctccatctgatcattattcatcttttcaaatttcttagaaaagctaagaatcaccactgcataaattggcaaagacagtagagtaatcacaaatagagtggaattttgaattgccaaaactattcccatcacaattacaattgaaagatcaagaaataatgaaataactgtactggcgagtgcgtcaataattcgactagcatcagagaaccttgaggtaatttcccctgttctacgagttacgaagaattccattggtaattcaaaaatatggcgaatgtattgtaagttaagatcaatacttaatcgctgacctagaacatccaatagaaaattttgcccgtaagaaaagatagagttgaaaacatatgctatcaataaaccaatagctaggatcgacaaagtttggtatgtaccgctaggaatataagtatcaattaagccttgcaagaagtatgagctacaaatactaatgattgtcatcaaaagagcagccaaaataatattagtgactagtttcttttgtttgaacatgtatggaaatagtgaccacagattttgctttttctctttgagtggctcaaaatcatcatttgggaccataaaaagggcaattcccgtccattcttgagaaaacttttctttagacattttcgttaaaccaacgctaggatccggatcagcaatcactaaataatttttggttgccttaatcacaacataatagtggagtaattcgccttgctttaagacgtgtacgatgaaaggatattgaatgtctgcatcaggatcaaacaaggacatgtcagctttaactgcttcagtttttagattaaatgcttgtgctgttttaactaagcccagagcggtagtcccttctaaattagtgcgggctgaatgacgtaaatgggctaaaaatactctagaatgatattttttaagaatcatagctaagcatgcaactccacaatctgattcgtctacttgtggtacataaattgatttatactgtagtaacatcttttccactcctcatattaagttgaatccattatttcatgattggaaaactaaatgtaaaaaaataccaaatcggttattctcattaccgattcggtattttagttttctaactagattgagctactcaactttaatattttcaaatttatctacaagctttttaaccacggctttatacgatctagaataagttaccatctgaccattatcaaatataataatgcgttccttcgtgtcaattgcactaatgttcttaggatttaccaaagaagattgcgaaacttttgccaagaatgggttttctttatcaatctgagtaatatttgccttatactcaacttctccattctcagtaaccatatgtactttatgctgtgtagtactgtgttcaatgaaaagtatatcgccttcggccactttacatacgcgccgaccaatcttataagtaaagtcacgttgactaaacttaattctgttagataaattatcgaaggcgttacgtaacgtttcttcgatacgttgaataatcttatcagacgacatagacttactaatataatcaattgcaccgatacgacggcgatacgttaatggagcgtacttatcgtacgccgttacgaagattatctgggcattttcgtcattcttcttgatgaattcagctaaatctacgccattcttagctttagactctcgacttaattcaatatctaagaagtagataccattcttaatatcatttgtgactatgtatcctaccgcttgagcaaaatcgttagcaacaaacgtaacagattcatttaattcagcgtaaccttcattatcatctattaagtcttgaatagatgcattgatattcttagccatctgattagctaaatctttatcgtcatcgcatacaatgattgggaacttactcatcctcttcaccatcttccgtatcaattgtcatataaaagtcgaaccagccgtcttgaattgtataagaaatagacatatcaggatatttactctcaatttccttaatattagctaatccaagccctttatggtctttcttagtagtaaagccacgttgttgaatttgactagttgagatatttttattttggattttatttctgatttcgaactcaaattcatctgggtcatcagaatagaccattatttggacttcagcacttcgaatatcatgcttttcggcaatcaatgctttactttcctcaattgcattatcgaaagtaatgccaataatacgtactagatcgagttcatctacatggtctggtaaattacggatattatttcgacattcaaaattatatggtatatccaaattatacaattctgttatctttggaataataatgctcttaattgatttaacgtaaatgtgatttaggtctttatatttaagtaaggctttagaatttaggttagtttcagtatatttatctagtttctgaattacttcttgaacgttaccttcttgcgcacttacctttaaagaattaagaatatttttgtaatcatgtctgaaggcgcgaagatcatcttcacttttttcaagataagaagcatattcttcaagctgatgctgctgttgctttaatttttcttgatcctttttatttaaaagtttttcttgtaccatcgtcatttcatgatatataaatatagcaaaaatagtttggataagaatatagagagaaaagaacaaagttaatggtgtaaaagatttgctttgaatatatatgatagagatgctcaccgtagaaacataggtataagctaatatgcctacgaaaattttattattttggtttgctagataattatatatttttccattacctagttttattgcaactatcatcattagtattagtaagaaacgtagtgataattggcctatcaaagtaaatgacataacctgagtgatcatatcagacacaatatcaactaataaatctaatgtgcatactaatattattgaaccaaatagtatttctaatgtattattttttctcaaatataatacaaaaagcaaagtttcaagtatatttgtgaagattacgccaatattacctatagacaataacaaccctaaaaaaatattagcaatacacaaaaatagaatctgtctctttttagatcttactcttgatattttaaaaaaacaccatacatctgctaaactagaaaaaacattaagaaaaagaaataagactatcttttccatatattattccaaagttttttactcaagaaattaaaaccaacatgtgccgtgcttccaccaacaaccttagtcaattcttcttccttcaaaacagtctttttaacattttgcttcttcatgatatttcatcctttcatgattttatactcaacttgtttacacctttaatatatcatgtacttttaagtaaattaaaaaagataccaattcagtcatactttcgtaccgatccggtttcatatttcttcaaacgtaaacaactgacaattaattttcttagctaattcctgacagctatccgtaaagccagatttggaaaatagataataatgcttaagtggatacttgaagatttcactatttgtaatcaatttttctaacacactacgagagatcggttcattcttccatttacattcgccgaaatatccatcacgttcatcgtcagagaatcctacaatatctaactcaacttgttgatgtgttctcttatcggttccccaccaattgcccaagtggataaacggattaggaacaattttttcattcatatcctgagaccacatgaagtcttgactgtatttttcaaactcaggtcccatgaaatcagatagacccttttgtacttttacccaagcaagatcagttaagccacgctcaattagatcggtttgcttgccaacaaaggtataccagaagcggaacatcccgtcacagatacgataaacgatatttttgcttttactcttcttttgctcagtaaccggtaactttttctcaacaatacctaaatctatcaaattattcaggtacgtggttagcggaccagtttgtaagtgggcggattgcgcaattttactatgcttagaagcacctgaagctatcgcattgataatcgaattatagttagttggatcgcgtaattcctgttgtaacaagttattaggctcatcaaataagcgacctgatttactcaaaaagtttttcttaatattatccgcaactgacatgctgtctgacatataactcaaatattggggtacaccgccacaaaccgtattgatgataaaagcgtcctctttactgagttttggtaacatttcatgtgcttctgataatttaaatggttcaagctttaaggctaaagtgcgacgaccatatagtggactttggtagcctaagacttgtcgttccataaatgacatcgatgaaccacataaaatcaaaaataggttagtttctttgaattcatgatcaatgtaggattgcaacattgaactaattgtagggtaagccttagccaaataaggaaattcgtcaataactaaaattacacgttgtttttgagctaggtgtgtaatttctttaaagcattcctcaaaatttgcaaatttttcttttccaccctgatctgtatttttaaaaatactaattgcatcagaaaaacgttttagattatcttccgcattttcttcaagtgctacataataaattgactttttatcttttaaaaactcattgatcagtgaagtctttccaattcttcttcgaccatagatcactgtaaattgaaaatcattttcttgatacgcctgattcaattgctctaattcttgatgtctacctacaaacatagcgcactccttttcactacatcgtaatatactacattatattatactataacacgatatagtataacgtaatgtacgtgtattctatttttgtaataaaaatggccgttacttagagaaatagcgaagatcattaaattttaacatgctataataacaatagaacaagaataaaaagttttagcgtgcgcgttgaggtagctcctcaacttagtcattaacgtgtggctctgctttggcaaagcttttttgttatgttaataccctacaaaaaagaccgtgcatccctgcacggtcttttcatcttatcacatctattttctaacgtattcgccgttcttgtacttaaattcaatcttcttgttaggcaattgaaccgtaattctgcgatatacaggaccgaagccgtgcttttcaagcttaactttcacgctaccgtccttgtttaccttaaccttgtacaagttgtattcgcccttttggtacttaaagtcagttccgttatcttgatagtgaacgtacttaccctttttaccaaatagtctaaaggtcatactctcgtctggttcaccagagatgtggctaacttctttaccccatggcaagatagtgttcttcttgataaacagtggcaacttgccaattggtgcatcaaccaaaatcgtggtctttccagcatgttcaacaccattccagaaatcaatccattttccttttggcaaatatacggcacgcttggtttgaccttcttgaacaactggggctgccaaaatgtcctcgcctaccatatattcatcattcaagttatacacctgtggatcattttcataattaaggacaagtggacgcataattggcaaacctgtcttagtttcacgatagaattcatcgtaaagatatggaatgaaacggtaacgcagcttcaagtacttacggtaaattgacaaggttggttcgccaaatatccatggttcttgtgagcgagttcctagagccgcatggtttctgtacaatggactaaacaatgcgccttcgatccaacgagtcaacaattcaggtgttgtgtcagcaccaaagccaccgatatcagtaccggcaaagctgaatccactcatacctaagttacataattgtggaatcatcatttggacatgtgtccataaactttggttgtcaccagtccaaactgtggaaaacttttgcgttcctgcatatgctgcacgcgtaatgacaaatgggcgttttccactgaatttcttcaaaccttcataagttgccttagccatgttatgaccatagacattgtgcatcttcttatgagttgaagcttcttcttcattatggaagacgatattttgtggaatttcacccttgaaggatgcaggttcattcatatcgtcccagatacctgaaacaccaaggtcaactaagtacttgcagttcttagcccaccacttacgtacttctttgcggccaaagtctgggaagactgaatcgccaggccaaacttggtttacataaacagtgccatctggagcctttacgaagtagcccttttcgataccttccttgtagatcttatagtcatcatctttcttaacgccagggtcaataatcgtgattattctgaagcccaatttacgcatcttagctacgaatttctctggtgactcatagttatcttttctccaggtaaatactctgtagccgcgcatataatcgatatccaggtgtaaaacgtcacatggtaagtcatacttacgcaagttttcagcaatcttctcaacttgcttttgactgacactgtagccccaacgtgattgttgatagcccaaagtccacttttgtggcattggtacacgaccagttaaataagtgtagttagtaataacttccttgagtgagtcaccaccgatgatgtagtagtcaatattgccatcaaccgctgagtagtagtaatagtcattactttccttacctaagtcgatgtggttgcgataagtattgtcaaaaaagataccgtaaggatgaccattttttaatcctaataaaattggaatcgacttatacaaacgggtaaagctctctacttgcggatcaggattgtcagtattccaattatcataagcatagtggcgtttgttcaaatagccggttttatcacccaagccataaaattcttcgtcatctgctagtgacttgaccacttcataataatcggcgtcatgctttcccagtaatttatccacatcatggccttcagattcagccagcttcaaatgttcctcatccatctgtcggtcaattggggttcttttcccccgataatctacgaccaatggattgccttgttcatcaaagacgtcaattttttcatcatcataagcttttactatcaacttagccgtagctatttcaatatgatcgcctttatttttaactgtaaaatcagttttaatttctttatcgccttcgatagcataagaattgctagcattacctcgatcttgaaagaatcgcataatttccggtgttaacacggtcaaaatcattggtccattctcatagtttaaggtaattttttgtccatctttagtaaaatcagtaagttgattaatcataatttacctctaaaaaatcaaaagttatgtattcgctttcaattttaacacaataagctaatcaattgggtcataccagaaaaaacaccttcagaaatttttgtatttaaatacaaaaaaactgccttacggcagttttatttaatttattccatcggaaaaatcttatctggattcaaaacataatttggatcaaaaacatgcttgatctttctcaaaagttcagtgtaatcatgaccatagaaatcctcaaaccaatctttgcaggcataaccaataccatgctcgccagacatatttccatccaaagctttagctgtcttataaagttcggtaatcacataatgactcttttgctcaaactcttcgtcactcattgcatctgagcaaagataaatatgtaaattaccatcgccggcatgaccaaagttaggaattcgcataccaacctcttgttccaattcatcaactctatgcaaaacatcaggaatatgattaattggcacacaaatatcaacttcatccatctttggcgtagacttttgaatagccaaaagcaatgcttcccgacaagtccaaatcttctttgcttcctctgaattagcatctaaaattaccgcatcagctgctttaaacttcttcgttgctgcaagggcaagctttaattccgcatccaattcctctttagttaaagaatcaagccctagaataatgaagccatcgccatttgcaatcgggaatttttcatcgtaatacttttcccagagactaatgacttttctacccataaattcaacggttgttggcactacaccagaagccaaaattgctggtactgatttaattgctttatccaaattaggaaacggaataattgcattgatcgattgtttaggacgtggatataaacgcatggtaacttcagttactacacctaaagtcccttctgagccaatgatcaggtcttttaacgaataacctgatgaggacttaactgccttagcgccaaatttgtaaagtttaccatcagttaaaacaaccttcaattcgcggatatgttctcgagtaacgccatatttaattgctttcaacccaccggcgttagtatccacattaccaccaattgtagcccaatgcattgctggagctggcatataagtaaatggtttattggctaaatattcttcaatatctttcaaccgaatacctgcttgcacagtcatcgttagactttctggctcgtattccaaaaccttattcattttcaccatatccagtgaaatgccaccttcaacggttaaattgccacccattagaccagtcgaattaccacgcggaacgataggaatatgatgatcgcttgcatatttaacaacgttttcgacttcttcattagtttcaggttgaattaccaagtaaggcattgctctaaccgtcttaaattggtcatgatcccaatgaacagttggcttagtaatgaatcgctctggatctgagataaatttactcaaattatctatatctgttgcagttaattttttaaagtccatctttgacacttctttccaaattgaaacatcctatattaactaatgtatccgcttttgtaagcggtgtcaaaaacaagaactgaagatttttttatctaaaaaagcaaatttccatactacctcactttaaaatgcgatagtatcgactttcatttaaataactattacacaaaatatgaaaataaaaaaactgccttacgacagtttctagttaaataaatccgacatcttagttggaatattattgtttttcacaaaatactttttaaaagtaggtaaatctgcattttcttttttcacatacatatcatgtaaagcccaaaatgcagtgattaacaaattaacgcccaagacaattaacataccgattaaaatatatactaagtaaagcattgatctatcccccgctatatcgtcacttgacccagagtcgcatcttcaatgaagtatctgacgaaagcttgattgaagctcatgccctggccgttgtaaacatgccactcttcgcgtttggcacctacagttctaatgattgaaattactgtgcaaattaccaaatatgcgattagcacgttaaaaattattttcattaccagcatgtctacacttcctctctgtactactcaactaatacactaatatttattagtcaatttgtcaacatcttttagtatttacttttttctccccaggtataaaaagccatagatagctggtccgatcactaccgccccagctatagaaactataatcactgcaataaagcgaggcatagcaaaaaattccgagctaaatttcatacaggcccaggccccaaagaaaaaaatcgcccagccaattaaaattgaaattagcatatttaaacctgaaaatttaggtttagagtttttattgttcatcaagttttctctttcataaaaatattgtgccacaaattgaaggtcaataaacaaaagtgacagattcggtcgttttttagacttatttggtaaaaaataagggagattaagtaaaatatggcgcttaatctcccttttgaatcaataattatttgcccataagacctgaaaaagccattcctaaggcagcaccaccacatgcacctgctttagctgatacgggacgagcataactagtaattgcataatgaaacttcatcacatcatgtgacaatttaccctgccagcttaatggatcaagaccaactcgaattaagttgcagacataattagctgattcaccattttctaactcatgctttgcatcaagtaggatttttctttcttctggcttagtatcttcatttactagtaggtcagtaatattacttaatagccattgttttaaatcatctttattttcttgatacatttttatccctctttttcgactttttcattaatatcaggatgcatccctacaaccattttagaatctttcatgttcttcatcgattcatttattttaataaaaaactctgcaagtagcagagctttttacctcattgcagagttacttatacatatacttagcacatgcttttttagaatccataccattacgaatcttcaaagctaattcaatcgatacatccgcaataattgattgtgggtcaatcacattgtaaggatgatctggtgccttttcctgagctaacgacaattctgtacatcccagcaagattacgttgcagccataatcatcatgcattttttgcaagatctggtggtacaatttaccatcaaccattcccttttctttaatatcggaataaatgagcttattaaccatcggttgaatttccggaccacctaattctgcctcacggtgaaccgcatgaatttcatccacatacaaatgatcatagattgacccttcagtcgcaatcaagccaattttcttttcttgtgggtatttttcaataaattgatgcactgctattctcatcatgtgtaaaaatggaatatcagtcaatgcagccaaatcatcataaaaatagtgagcggtattgcatggcatcacatagaagtctggtcccaatttggcttggcccagaacatcgtcacgtaaatcatagaaaaagtttggtttagtatgatctttaatataagccgttctatcaggaatttgtgcatcattaaccaaaatataatttaaataatcttggtccttagctatttttacacggtgattaattaaacgaacgtagctttctgtggcaatagttcccatgccgccaataatactaaagaagtgtttcactattttcacttactttctaaagtgttcttcttgaccttccaactcattaattacctgctgtgcaaccacaatatcagatggatatggggtatttactccgcgaattttttggaaagcgtcagcccccttaccacagattagcacaacatcatctggcgtagccatggcaatcgcatcatgaatggccttcttacgatctaactcaatagtaacgtcgcacttagagtgatctattcctgaatcaatttcttcggcaatactctttggatcttcaaagcctggatcgtctgtagttaaaaatgctttatctgcgtatgcagtcaaactttcactaaaaccgggacgacgtgacacgcctttatcaccaggagctccaacaacaacaataatcttaggatcgttgaattcgttacgcataaatctcattaaagccatcattgaggccttattatgagcgtagtcaactacaaccatgccgtgcttctttgttctctcggtttgcatccggcctggaatagtaacatcgcgaatacccttcgcacattgatcatggttaagtccagccaagcctgctccaataattgcggcagtaccatttgactcgttgaaatcacccagcatctttaaagtataatcaccattaattggcaatttacgtgccttatcactagcacaaactaaattgaaccgagtttctttcatatctaattgttcagaagagaatctgaaatcaattggctgcttcaagtctggattttcaaaattatcgcgggcaaacaaataaatactatcggggttggtagtagttgttgcggcagcgtagacttcatcaaagtgtgcagtttcagcgttgataatacatttacgtgagttaacaagcaattgtaatttgcagtgcaaataatctgcaaaattagggtgttcgttaggaccaatatggtctggactaatattcaggaaaaagcctaaatcataagttaaaccgaagacacgatttttcttatatgcttgactagaaacttccattaccaagtgagtcatgccattatcaacagccgttctcatgtctcggaataagtccaaactctctggtgtggtcaagcttgacttaaagctatcttcaggcttaggaccgaccacatcattaactgaagaaatcagagctgtcttaccaccattcgcttgatcaagcatccccttcaaaaagtatgctgatgtagtctttccctttgtaccagtgaaagctacaacaaacaagtcatcttgtggaaaacggaagaaagcagctgacaaaagagccattgccttagaaacatcgcgcacaattaaagcgtgcattccttttccttctggatatggttgttcagctacataacaaatggccccattgtctttagccattgacaaataagttggtctaaagcctgctcccttgcagaagaacaatgtattagtttgaatatcgcgtgagtcataagacacatagtccattttagtagctactgtatcttgcactgcgcttgacttgagcaagtgatgctcttttaagatcaatatacaggtatttaaggaaatactcattaacttttctcctcgttgtatttaaaacatttcagtcaaaattataacacagctagtgtgttggtgacgctttcttcggatcaagtggcaaacgaataataaaactagtccacttttcgtttgattcacagcgaattgtaccatggtgtaaatcaaccacacctttggtgatagataatcccagaccagttccgcctgtcttagtatttcgcgaagtttctacccggtaaaaacgctcaaagattttatttaatgatttcttcggaattggtgccccattattttcaacgcgcaactctacttcacgtttgttgactaaattggctaccaatttaattttagttgcccctgtaccatacttgaaagcattagaaatcaaattattgtaaacgcggaccagcttttccgcatcagccttaatcgttagattctttggccgcgcttcaatctctatttcaatgccatttttttctgcttctaattcaaagccggccgctacctgctccaacattgaataaatatgcaaatcattcagatttaacttagtattggtcgactttaaagtagtatattcaaacagatcgttagccagtgctttcatttgttctgccttagtataggcaatattgacatactttttctgatcttctggcgaagtcactcctgcttttaacaaaccaagataaccaataattgatgttagcggcgttctgatatcgtgcgaaacattagtgatcaattcatccttagattgctcaattgcccgttcttcattaatcgaatttacagtactatcaaccaacgaattaatcgaatccactactcgttgcaattctggtcgtacccgaaaattaatccgatgatcaaaatgaccattagcaatatagtgaagttccaaaataatgtgacgtagctgcatttggtgatagcgtcgaatcaagcgccagtacaaaacaaccaagtcgcccactcccattaagacgatgaatacgttttgccaggaccagagatgatagccacctgcaaaagtgatcgtcttttttagaaagtagattccgttgaccaggctttcatcctgcaaaatagctaagtgaatcagaatgataattgataaatttaataaaaacagaaggacgaccgttacgaccccttctgcaaacaattcgctcttttcggcgccagttagcttgacgcgttcttttttcatcttatgcctcgaccttgtaacctacgccccaaacagtttggatgacatcctcaccatcagtggctttttgaattttatcacgaaggtgtgacacgtgtaccatgacagttttagctgaaacaattgattcttgttgccaaacacgttcaaagatttcatcagctgaaaaaacacggttagggtgactagcaagtaagtataagataccgaattctaaggcagttaattggatagtcttaccatcaatagtcttaacttcatgtgaatcacggttaattaccaatggtcctacttccaaaatatctggtttttcattcttaacttgcttttgacttcttctcaaaagtgaacgtacacgagccattacttcaagtggattgaatggcttagaaacatagtcatcagcaccagtgattaagccttgaatcttgtccatatcaccggttttagcagaaacaataataattggaatatcggagtcttttctaacttccttaattacatcgattcctgacatatttggcatcatcacatccaaaatcatcaaaacgatatctggcgtagtggtcaatttagtaattgcttccttaccactatatgccgcaacaggttcatatccttcatttttaaggtagatacttaatagttctacgatttctttgtcatcatcaacaactaaaattttcacgaggaatgttcccccttcttgtttattattctctgtttttctatctacagtttagcagatatcatatagaatattttacacattttagaaaaatatactgctttcattatcctttttaaacaaaagctaaaaaaatacacgtttctccatcatgaaaaacgtgtattcattctatttactttaccttatcatcatgcaatttagtttcgacataaacgcagacgataaataacagctgccttgtttaacgcttattgaatttccttcttgccagtgtagagttcatagtagtaacccttttgcttgattaattcatcatggttaccatgttcaataatatgaccatgatcaagtaccaagattaaatctgagttaacaatcgttgacagacggtgagcaataacaaaactagttctaccagtaagcaagttgtccatcccggcttgaaccattttttcagttcgagtatcaatacttgaggtagcttcatcaagaatcattactggctcatcagcaatcattgcccgcgcaattgacaacagctgtatttgcccttgtgaaaggtcgccgccatcaccatcaatcacagtttcataaccgtgatcaaggtcatggataaattcatctgcgtgtgataacttggctgcttgataaacatcgtcatcactggcatctggattaccaaagcggatattgtccataattgtgccagtaaagagatgggtttcctgtaaaacaattgaaagtgattttctcaaatcatcttttttaatgtttttaattggaataccgtcataagtaatcgttcctgaatcaatatcgtagaaacggttaagcatgttagagatggttgtcttacctgcaccggtttcaccaactaaagctaccttcattcccggtttggcattaatggaaatgtcatgcaagatttgatgatctggtacgtagctaaagttaacatgatcaaaaataatatgaccacgaacttgaaccttcttggttgagccatctttttgtggtacattccagtaccacttactgccgacttcatcgtttttcttagaaagagtaactgtaccttggtcagcttctgacttttgatcttccaagttgaaaattctttctgcaccagctaaagccattacaatagagtttaattgttgcgaaatttgggcaattggcatactgaattgcttagataactgtaagaatgaaccaatggcaccaagtgaaagcggagcccaactattaattgcagcagcaccaacaacaaaggcgatcaaaacgtaaagcaagttacccatgttacccataattgggaataaaattgtagcgtaagtgttagccttacctgaggcttgacgcaactcatcattatatttgtcaaagccttccttagattgtggctcatggctgaagaccttgatgaccttcaaaccattaagcatttcttcattataaccattgatttggcccagcttcttttgttggacttggaagaagtgacttgatctaaccgttaagtagcgcacaattccaaatgataaagcaaaaataatgaaggagaacacagtcaattgccaactaagtgaaaacatagcaactactacaaataataaactcaaagctgagttagtaaattgtggaattgactgtgaaatcatctgcatcaaggtatcaatatcgttagtataacgcgacatgatatcaccaaattcattttggtcaaagtatgaaattggcaagctttccatgtgaacaaacatttcgttacgtacacgatattgcactttttgagctaaaacacccatcagcatgttaaaaaggtaattagacaaaaaaccaatcgcatagatcccaaacattaccgcaattgcagtagctagagggccatagttaggaactttttctttagttaaaggcacaatataattattgatcaaacgttcaatgaataacgagccaataacgttgctggcagctgctagcacaatagtgatcatggaaacgatgagcatccatggacttgtactattaaccagtttcaataggcgcaataagattttggttctgctaccctttgtttgatttttacttttttccattgcttgatccaaattgctcacctactttccttgttcttcctggaatttagcgattgaactataaagttcgttagtcttcatcaattcatcgtgggttccgatagcttgaatttgaccatgatccatgacgataatccgatcagcatccttaattgaaacaattctttgtgaaataatgattttagtagtttctggcatatctttagccaaagacgttctaatttgtcgctcagtactggtatcaacagctgaagtggagtcatctaagatcaagatcttcggatccttaagcaaggctctggcaatagtaattctttgcttttgcccaccagaaacgttgttaccaccttgttccaccattgtgtcataaccatctggcatttcacgaataaagccatcagcatgggcgattttagcagcggcaattacttgttcatcggttgcattttcgttaccccacttgaggttatccttaatcgttcctgtgaacagcacattcttttgtaaaaccatcgcaacgttatcacgcaaggtcttcaagtcatatgacttaacgttgtgtcctgcaacccgaacggcaccagaagtaacatcataaagacgcggaatcattgaaaccaaggttgacttcgatgaacctgtttcaccaataatcccgattgtttcacctggcctaatgtgcaaattgatatcttttaaagcatcagccttgtccgcaggttcgtacttaaagctaacgtgatcaaagataatttcaccattggtcaaacgtttcaatggcttcttaggatcttcaattgttggttcttccgtaatcactgaccactggcacctgagataaccaattgcgtagtaatcatagctaaaatgtttaaactaaacaaaactgagtttgaataagtaaacattgaaattaattgaccagtttgtaaactaccgccaaccacttcttttgcaccgaaccagcagattgacagcgttgaaatattcaaaacagctgcaactactaatgcgttcaaagacataatcttttgtgcagtcgcaaacaacttgtaaataaagcctgatgacttcttgaattctttaatctgcggttgttcttggacataggtcttaacttcacgaataccacgtacgttttcacgcacaacctggttcattcggtcataccctctaaaaatcttaggaaagtatggataagctgttttaataatcaaacccaaagcaattgcaaaaaccggtcctaaaactgcaaagattaatgataaacgcggactaataataattgacataataattaaaacgatgaacatcattggtgctctaacagcaattctgatgatcatttgatatgccatttgcacgttgttaacgtcagtagtcaaacgtgtaactaaactggcacttgaaaagtgatcaatattttcaaaagaatagtcctgcatatggtagaacatgtcttggcgcaagtttgcggcaaaaccagcagctgcatgagctgagacataactcgcactagcgcctaaaattagcgaaataacggttaacactaatagcaatagccccattttactaatataggacatatcccccttcataattccgttatcaatcaaaattccgaccaaatatggaatcagcatttcaatgataacttcaccaataacaaacattggtgagagcaaagacaattttttatattgcctaattgatttgctcaatgttttgatcatagagacccacccttctattcttttattcaatctcgcaaataaaaagataaatggatcatctccatttatcttttttatctatattaagtttaagtatgtgcttatttttacggaaattcaattaacatgcttgcaaaacaggtaaattatttatgttgttgtggccttggtgcaaatgcggaaccaacaatattgtagtgctttctgaataaataacgtacaccataggcagccgccgcgataacgatgtcagctactgctggtaaaactgggttgattacgcgcaatgctgggatttgcaaaatccacatccagacaaacaaaacaactgctatagccaacattcttaagatcagcttaaccaatgaaggacgtttaccttgctgaggcattagccaatcattgtatttaaccatgaagatccccattaaaatacctacactggcaattgtcagaatccccatttgtgaattatacggttggttcttagtttggaataatgcaaggataccacataaaccaacaaaaattgctaaataaagcaatgcgccatcaaccatcaactgccaagttggtgtagccactggctttttcttaggatgaagcatttgttcagccttaattgctggtgaagccaggtaaagcccattggctggttgcccatgacgttgggcaataataatttcactgagcaagccattagtcatcgcaactgcatcagcacgtgacattgaaccttgtttttgcagttctttttctagacgaaaaacatagtcactgttcttgttactcaacttttcacgcaaagcttttggatcttcctgcttaattttttcatcctgagtatcaagctcagcttgcttctttaatttagcttgtttttcagtgttaatttttgtttgatcttgttctctctttgtctcttcagccattcttactcctagacgttaaatctaaattcaataatgtcaccgtcttgaacctcgtaatctttaccttcaagacgcagcttaccagcttctttaaccttttgcatagtttcaagcttgtctaaatcatcaaatgaaacaacttcagctcgaataaaaccacgctcaaagtctgagtgaataacaccagcaacttgtggagctttcatccctttgtggaaagtccaggcacgggtttcaggaccaccggcagtaaagaaagttctaaggcctaagatatgatatgcagcacgaatcaaacgatccaagcctgattcttctacgccttccatctcaaggaattctttcttttcatcatcagccataccagcgatttcttcttcagttgcagcagaaatacctaagcattctgcaccttcgctttcggcatgcttcttaacgatttggtaatacttgtcgctttctggatcagccattgaatcttcagcgatgttagcaacgtagataactggcttggaagttaacaagaacaagcccttaacaatcttttgttcatcttcattaaagtcaattgaacgggcagcattaccttcttcaagtactggctgcaatttattcaaaacagccatttcagccttggcttccttatcgccttgttgagcaaccttctttaccttattgattctgcggttaacagcatcgaggtccgcaatagcaagttccaagttaatagtattaatatcttcttctggatcaaccttaccagtaactgaggtaatattgtcatcatcaaaggcacgaacaacgtgaacgatggcatcagtttgacggatgttttcaaggaacttgttaccaagaccttcaccttttgaagcacccttaaccaatccagcaatatctgtaaattcaaaagttgtgtgcacaatcttcttagcaggaatcaattcttgaattcttgccaaacgcttgtcaggaacttcaaccattccgacatttggttcaatggtggcaaatggatagttagccatttcggcaccagccttagtaatcgcattaaacaaagttgacttaccaacgtttggtaaaccaacaataccagcagttaatgacatttgttgtcctctttttctaaaatcaattttttatttttacttacttgtctattttatccaaaatttggccgagcgatacgatcttttggcacatattgctctttttttgcattaaccggatcattcgccttagttaatagcttttttagcttccggttaaactcgctgcgcggcatcatgactatgtgcccacaacccatacattttaatttgatatcagcacccatgcgcaggattttccaatcattagtctgacaagcatgaggctttttcatttgaactgtatcagccaaattataaacaatttctttagccatctaaatcaacacctaacaaatcaagaatgcggttcaattcttcagtcgaagcaaaatcaatcgataaatgacccttacctttttgtgtttccgaaatattaacactagagccaaacttgttagctaattggctttcactagcgcggataaaagcagactttttagcagttttcttgctgcgtggcttcttagcattcagttcattgacaaccgcttcaactttacgaaccggcatcccttccttgactactcgcttagccagcgcatcaatcttttccttatctttcaaacttaaaagcgttctagcttgtcccatcgacagttcaccatgttggagtaaacgcttagtcttgctaggtaaagtgagcaaacgcaaataattagcaatatatggtcgcgacttgcccatccgcttcgaaacttcttcttgcgttaagccaagattcttctgcagcatttcataagcttgcgcctcttcaagtggagttaaatcttcacgctgcaagttttctagaactgccacttccatcatttggctttcgttaaacttgcgaataattgctggaatagtcttcttcttagccaatttagaagcacggaaacgacgctcaccagcaatgatctcatatccattaactgattcgcgcacgataattggctggaaaacaccattttccttaatagaatccgacagttcttttaagctcttatcatcaaatctttttctaggctgataaggattcggccgaatatcgcccaaatcgagttcttggacttcttctgcctcttgaacttgaggctcatcctcaaataaggcttcaagaccacgacctaggccgcccttttttcttggctctttacttcttgagtctcttgtcatgagcttttaacacctcttttgctaaatcatcatataccttggcaccacgagattttggtgcatattctgtaattggctgaccataacttggggcctcagctaatttagtaattcgaggaatgatggtcttataaactttcttgctaaagtaggactgcacttctttaaccacttcagcacccaagttagttctggcatcaagcattgttaacaaaacgccttctacgccaagatctttattaaaatgcttttggactaaacgaattgtgttcaaaagttggctaagtccttccatagcataatattcactctgaactggaatcaaaattgaatcagatgcagtaaaagcattaattgaaagttgccctaatgatggcggacagtcaataaagacaaaatcatattgatcgctaattgcatctaaagctgactttaagcgtgtctcccgagccatcattgaaattagttccgtttcagcaccagacaagttgattgtggctggaaccatatctagctttggcgttgaagtatggtgaatagtatcttgaataggaatttcgtcaatcaaaacattgtaaatgtcctggtcaatctctgatttttcaattcctaaaccagaggtggcgttaccttgcggatcaatatccacaattaaaacgcgataaccacggtcggcaattgaggctgctaaattgatggtcgtagtggttttacctacgccacctttttggtttgcaaccgaaattacatttaccatattgttcatccttccctattacttccttttcaattcaattgtgatcttataatcatccggatctttattttctgttactttgactttaattcctgagtcttcggctaacttaaccgccttcttaatggtgttaatttgtacctttaagtctttaggaactcggctaacgacccgcttagcttcttttttagccttaggcttagggttaaagtaagcatccacatctttcacaatctcttcagtttgtttaacgtttaagccttttgcttcaatttctgtcaaaacgcgatcttgatctgcattacttaagccgatcattgcacgaccatgacgagcggtaattttgccagcaatcaaagcttgctgcacattatcatccagcttcaataagcgcaatttgttagccacataagattgagacttacccatatttttagccaaagcagtttgagtcaaatcattcaattccattaaattggtataagcttttgcctcatcaattggatttaagtcttcacgctgtaagttttcaatcaaagctaatgaagcagcttgatcatcactcatattcttgacgatcgcaggaatagtctgccagcccaagcttttagctgcacgataacgtctttcacctgcaataatctcatattgctcgtcatcgccatcttcacgaactacgataggttggagcaagccatccttatcaagtgtttcagctaattctttaattgaatcatcagaaaattcacgccgtggttgatagcggttaggaacaatcttgctcaattcaagatcttgaacctgtttcttcttaggaatttcatcatcatgatgcataaaagaaaataatgacataatatacccctttctgtttaatgaatcggtttgcgccgcggggtgcctgcttgacgtggatactttttaggtgttgctttgactttttgaactaagattagagttcgttcttcttcgctctcaggtagagtcaattcttcttccttaatcagcttaccgcccagcaattcaagagctttttgaccatcatccaattcatcttcggcttttggtcccttgagggcaataaagtaaccatcttttttcaccaaaggcaagcaatattcactcaaaacactcatccgcgcaaccgcacgagcagtaacgagatcgaacttttctcgataaagcttattttgaccaacgtcttcagcgcggccatgaactaattcgacgtccttcaagtctaacttagtaattaagttctttaaaaaagtcaatcgttttgccaaagaatcaacaatagtaatcttcaattctggctgcaaaatcttgagcggaattgatggaaaaccagcaccagcaccaacatcacaaagagtagcaccatctttaaaaacatcgccaaaagtaaacagcggcgtaatactgtcataaaagtgcttaaggtaaacctcatcttcttcggtaattcgtgtcaaattgacatgctcattaacttcgatcaaataattaaaatatattttaaattgttcaatttgttggtcagttaatttaaaattgtgttttgatagttctaaaataaatttttcaggattcatttttcacccgtgaaaccgtgtttcacacctctaaatttaacgcaaaatgcattgattagtaaagatatttcatcttatcaattatgaagtatttttactcaatcgtcaaagttttgccgcccgcaaaatagggtataataaggcgcaaaggagttaaaaatatgattgttactttaattgttttagcttacttagcatataaaacatatttaggctataaaacaggctttacacgctatatcatcggtttaatctgttccgccattgtctttatggttgccattttcatgcaaaatccatttggtaattggctatacacacaatacactggagaaatgattaagactaactccactaacaacgtggaattaatgattgcacgctttgtcgctttctttattgttttcttcgtgggcaaaatgatcatgaagattgtcaaaagctggattcctaacaaaaatccacatgcgactaacttaggcagtattctcgacaatgtcttgggtgctctagcctccctaattgctagttattttgttgtttatgtagttttgtccatgttcaatgcactacaaaatccatggtttatgcagcaaacaattgattctagctttttgaggtttatcatttacaacacaccggggctttcaaacggtgtcttcaataatatctttaatattggcaaaactgtgggataaaatatatcaaaaaagatctgcttgtatcatactgagcagatctttcttgatatgttttaactaaattaatactacatttatgaaccaacattcgatatacttattagcgcaggaagttttatgagcggcggctggttctcccccccggaggtgaggcctatgggctacattgatgaaagggttccagccatgtcgatttacgagagtatctccttgatgcttttgttcggtacatttttgttggctttgctgacatatattgaccaccaccaaaaataaaaaacgccgctcaaacatactttggccagttattgagtagcgtttaacgtaaaatttaacatttgaagccgccgctcttaaagcgggctgcttggagtccctaggactcctttttctttagtcattatagcatatttcactaatcaccgaaattatcatattcaatatgttcatcattataaacaaagattgcaccaattcgatcagggttatcatgccaaccctttagtggcttgccagcaaagaataatcgtttgcattcaatttctgcttcaaccgatgttttggtaaaagtagtcacaccagctaaatcagtctttacaggatacccggttctaggatcaatcaaatgatgatactttttaccgttaactactaagtagcgctcatatgtcccactagtaacggctgagcattcaggcaccataactgacgtaatattgtcgcctcgcggctgtttaggatcttgcacaccaattgaccactggccactaattcttttaggcgaatcaccaactaacaagatattaccgcccagattaataattcctgcttcaacgccatatgcacgccacaagtcacgaattcggtcggcaatccaacccttagcaattccacctaggtccagctccatgcccttcattttaagaaaaacagattggtcactgtcatttaaaaccaccttaaatgggtcagttaacagcattctatctttaatttcttcatctttaggaacatgtgcgcctttaaaaccgatatgccaaagcttaacaactggtccaatcagagcattaaagccaaaattctcacggctcttttctactgccaatttaaccaaaccatacacagcactagagacctgtaccggatgttctccagcagcatgattgatatccattacttcagattcatctcgattaacggtaaaaatatcttcgtaatgatcaattaaatcaaatgatttttgcaatagatcacgattttgagtaccaaaaatctgcaatgtaattgaagttcctaaagcatgatgatcaccaaccacctgctctaatgctaaatctttaatcataattatttctcttccaaatataaatcacgcaacgcctcacgtagttctgtcgttacgccaattttttcttgtaaaaagttatcgaaactaccaaaattctgctcaatagcgattaatgaagtatccaaaaaagcatcagaaactgaacctaaaattcgcatattagcgcgaaaacaaagattctcgccctcttcttgcatttttttatctcttttggcccgatagttattaagcatataatttgagtacaaatagtcctgtctaattgtttccatatctacgccaagcagatataacaagactacagttaccaatccagttctgtcttttccttctgaacaatgataaagtacagcacctttttcagtattggccaacagctctaaaattttatgcaagctatgttgagcgtgttctttcaatacatgtgacttgtaacgctcacacatcattctaaagccagcatactgatcttgacgataagttgcgaatacttgggttaagtctttcttaccgcctttggtgttgtcatcaacagaaattggaatacagaaatgctctacgccagggattttgctgtctggacaatggtcacattcagttggtgaacgcaaatcaataatcttagtcaagccataattgagcaaaaactcttgatcatgtctcgttatgttgctaatcttgcccgttcttaataaccgatgcatcttgaccttacgtccctgatagccaacatatccgcctaaatcacgcggattacaaactttttctaatggcaaaatatttggtttcattaatttcatctctttattaagtattttgataaaaaagccggatagtgtccctatccggtaattttactatcacgtggtaagtcacgcaaaattatttgttagcttgttcaacaaatttaataaagttagccatcatagcatctagttgcttaatataatcttcattggtcaaatcgccagtttctttatcaaaattgcttgcagcaccgccaattaagatttcattgcctggcaaaacattggcactcatgtctggtgaaagcaagatttcacgagcatcttcttgcgcacgactagatccttgaataccgtatgaagtaccaacaactgcagccggcttcatcttcatcacattaggaccagcatgtgaacctaaccattcaagcgcactctttaaggcagctggaattgagtgatcatattctggtgtagccaaaattacaccatccgcattcttaacatcctcgatccacttcttagtaacatcatctggctcatcagttctacagaaaggcttaagttgatcgatttctttaacttcaatatcagcttgctcaccataacgcttagcaataaattttgctaaaaaacgattgaaagaaaatggagcgtttgtaccaacaattgctaaaattttcatttaaataagccccctacttagtaagttgtgcataccaatcatcaacttcatcaaagaagtgattcaaaaacttaagtgtacctgcatcggtcaagtcgcctttatcatcaaattgttttggtgccaaacccatcataaattcgtcaccagcaaagacatgagcactaaaaccaggtgcgcccaaaatgctcttcaagcgagtttgcgaacgagacgcaccttgaggcattggtgaagttgacacaataactactggcttatcatggaatgggtgaacagaactagaaagccattcaagtgcactctttaaggcacttgaaaccgagtgttgctgttctggtgaagcgatcaaaaccatatctgcatcagcaatttttttacctaaagctaatacgctagcaggagcatcaacgccttctttatacataggcaagcccttaacagtcgcaaagtcaaaatcatacttatcgcctaagtccttaataatgactttaagtaatttttcgttaaatgagttatcggcattggagcccgataaagctaataccttcataaaaaccacctttcaaaaatcctcttagttatcattatagactaatgtagcttaatttatgtcattttaattttaataacaacaagaaaaaacgccttcgataatgaaggcgccctctactgaatgaaaagcacaaatgattggtgaaatttctatgccaagttatccttaagcgaagcttcttcgtcggcagcaaacattgggttttcttgagtttcgctgagacgattgttaagcatagcatcgtggatttgagcattcaacacattgacgatttgagtttggctgaagcttgcaatctcattaacaatcaatgcagccatacctgtagtagaaatccagttagcaattacgatgtcatgaatcttttgatcatcgtaatcaacatcaggatattgttccttgaacttttcagttccaagttccatcaaagtgtcagcaatgatcttgctaccaaacttgccatcaacgaacattgctctaaacaagttaacatgagcttgagcaaaatcaatgtatgacaaatccaagtcaatcaaaggttcaccaacgtacttttgttgtaaagtatgtgttctcaagtcattagagattcttctcaaaacttgattgcgaagatcatccatgttgttaaattctagatacaaaggttgggttgagaagtgtcctgctttagcaatgccacgagcagtcaaaccttcaataccatccttgattgccatcttgtaggctgtatctaaaatcttgtctttactaatttctttttttcttgccattttaatgcacctcaatcattgtataaaacatgtgcttttcaatacacttgttttcttttcttcatcactataatatatccaaaaaaataacaattgcaagtcttatacactaacttattaaaaaatattataatcgcttaaatagcgatgagccgttgtctcctgtaaattgatcataatgtgaagaagccatttcaataactgcttgcttgtccaatccttgtgcagcacaaaacgaaaagaatgcagcagataaaatatagccgcgttcacgatcatctgtcaggttatctgagaacttcatattaatcgaatgatttgcataatccgttgtcaattaaatcgatttattttctggtttactactcattctattgcaacctcttttttgttctaaaacaaataaaattaaaaatttaaaaatttctattataattatattcccggatttaaaattgaagtgcaacactaattgttaaacaaaaaggccatgaagacctaaacttgaagtgaccaaaaatcaagaaaggaagatcttcatgaccaactcaaattctagcatttccaagcattatcatcaattgaacagcgaacaacgtggacaaattcaagctctgcttgattctggcataacctcctgcactgctatcgctcaagaagtaggctgtcataaatcaactatcagccgtgaaattagacgaggcagtgtcctgcaaagagacagcagctatgtcttgtatgagcactattacgctgatactgcacaaatttatcatgaaaagcgccgcagaaactgctataagtgtaatccactgcaacactatgccgtttttttcagaatgctaagcagacgctttaaagccaaatttgatgccactagcattgatgaattcgttggtgaatttcacaggattatgccaaattatccatgtcctagcacgcccactgtctatcgttatattgatcaaggattgctggatataagcaatatcgacctgccaatgaagcttaaaagacgcagaaacaaacgccatcatagtcatggtggccatgctccgcataaaaagaatcttggcaattcgattgaacagcggcctaaagaagttgaaaacagaaaagttcccctgcactgggaaggcgatttggttaaaggcgtcagacgtaaaaatcaacctgccttaatgacactgactgaaagaaccactcgttttgaggttgttatcaaaattcctgactatcgggccagtacttgtcaaagactgcttcaaaaggagattgacagacatcctaattggtttaaatcaattacgtttgacaatggttctgagtttgcggatatgaccaaaatcaaaggatgtcagatctactttgctcatccatattctccttgggaaagaggcacaaatgagaactgcaatggacttctgcgtcaattcttccctaagggcaaaagcatgaaagataagtcagctgcttatgttcaacaggcaactgatgccattaaccgcaaacatcgtcgaatcctccaatatcacacagcagaagaactcttcaagcaatacgttccttcatagcctactaagtgtataattttttacggtaagttgaataaataattaaaaaagcccaagtcctttgaatttggacttgagctcaaacaaaaagaccagtagtctgatgttaagaacaaaaaacacattagaagctggtcttttatgaattcaattgtaactgaaatcgcaaatattataaagtctgaagataattatattaagcgtgaaagaaaaataatctgtttcttcttaaacctgattaaggaaatcatggccttggctttagctaaagttgatgatgaaatgattaccaaggttaaagcacagggctatcagattgataagaagaatgagcgctcaatcaatatggcttttggcgaagttaggtatgtcagaagaagatatgtctgcccaggcaaacaagcaaggtatcccttggatgaattaatgggctttgacaaatacaagcgctacagtattttagcagtcaaaaacatcttagaagtaagcagcgttgccacttatcgcaatactgctctagcagtcaattgcctgtctggctttaatattagccatatgcaggtgggcaatttggtaaaaatggccgggaaaaatattaaagcgggccaagaagcagattcaagatatgatgccgcaggcactaagaaaaaggtcccagttttgtatcttgaaggcgatggcgtggtgatcaaaggcactaaaagccggttggaatttcatcgctatcaggtctgtgaaggcattgtcaatataagcaagaaacgcagaaagcgaatcaatgccaaggaatttgtttctttaagccgacttgatgcgctgaacgaagccaaggagtacctggccaatacttatgatctttctgatactgtaattcttagcaacgccgatggcggtgctggatatgccaaaacagacttcgatgacattgtagggctatgcaagcgtcatgagcatttcttggatgtctttcacctaaataagaaaatcaaagaaaggctatattttgcgcctgacctgcaaggcaagctgatttctgctttggaatacaaatacagctatgacaaagttaaaactatcctaaccactgcagaaagccgactaattgatgaattgaataccgagctcaatcatgattatctggggcgcctaaggaattatattgatcgtcattgggacgatattaagccgtttaagaaacgaaaactgactgtgactaaagccattggctgctgcgagagcaaccaccgcaagtatacctaccgtgttaaggggcaaggcaagaaatggtcaaaatctggagcagaaggcatgcttaggatcttaagctgcatcaagaatcgagagctggaattttggcttagcagcgagtttgaagattcagaaataactgtattgactgaacaggaattaaaagcagcggcccgtgacagcttaaagaagcgtcatgaagttcatttaggcatccagcatggcgcattaaccgcacaggtagctggcaatagttatttaagcaagctaagcagaaatttaagtcatataaatatttaagaaattaaggttagactaatggtttaaaggctaccgcaaaaacattgacacttaccatagcctaactgttgcacttaatttgacaattcaggttataattatattacaaaatcaaaagaattagaaagcgtgtttttatcaatgaaagtttcagcttggcgctcatcatgcacctcaattttaatcgggaaaaaggcctctctttctggcagtatcatcatcggtcgtaatgaagatgctaagactgcttggcctaagcatttagcctttaatccacatcgagataatgtacagaaaaaccattttaaatccaaagacaataagtttgaaatggatttaccaacagctagctactcttattcttcaaccccagaatggacagataagtacggagtgttcgaagaagacggaattaatgaatatcatgtagcaatgagcgccaccgaaagtgcctacgcaaatgaccgcgttttagctgttgacccctttgatactgacaaaggaatcttagaagaggcaatggtcaccgtagttttaccttatgttaaatccgcacgtgaaggcgttcagcgcttaggagaaattgtagaaaaatatggtgcagcagaagctgacggaattctctttggcgatcgtgatgaagcctggtacatggaaatcggttctggccatcattgggttgcacaacgaatcccagatgattcctacgctgttgtcgccaatcaactagctattcaagaaattgattttgccagtgacgacttcatgtattctcaagacctgcaaaaatttgtctacgacaataaactctggcctaaaaatcagccattcatttggcgtgatatttttggcactcatgacgatagtgacttacactacaacacaccacgagtatggagcggtcaacgtctgcttactccatctgtagcacaagaacccgaaagctttaacctgccatttattcgcaagcctgatgcaccaatttctgcgcaagacgctcaacgcgttttaagcgatcactacaacaacaccgcctatgatttaaccaatcagaaaaacagaaataatgccactttcagacctatctctgtggctactactcaggaatcacacttgcttgagttaaacggtgaaaacatgattcactggctagctatgggtgtggctgcgcaaagtgtttatgtgccattctatcctcaaggcactaaggtaccaaatacctggaaaaatggaaaagaaacctactcaccaaattcagcttactgggtctttaaactggctagcgtcctggttgatcgtaattggggtaagtacggcaccgctttaagcaatacgcaaagtactactaacgaaaaattgcttcaaattagacagcaatatgatcaaaaattagcacaagaaaaggatcaagaacaacaaattaaattagtggatgaagccaatgccaaattagctaaaactgctactgatgcttataaagaattgatcgctaaactaatcaccgaacaaactggtgactcaccgttgcgtttccaaatggatcctaacttataaacaaaaatgcctcaatgaggcattttttcttactattttttcttagtcattaagccgtccatcatttcataaatatggtcggcgtatttttctagccgcggatcatgcgttactagaataacggccttgtcacgctttttcgctaaatctttaaacaattgtcctacttcttccacattttgcgtatctagcgaagcagtcggctcatcggctaacaaaatatctgggttagcatataaggccgtcgcgattgctactcgctgctgttgcccaccagataattcatttggatacttattaaccagcttttcaatccctagctgcttgagtaagccttgcaatttatcttgcgacaaattattttgcttttttactttatcaatcaaagtaaattgctctttaactgtcaaaaatggaactaaattataagcttgtaaaacaaagccaattttattcaagcgtagttctccactttgcttagcagaaaaattactaatgtctcgaccattaatcaaaatttcacctgaagttggtttttgcaaggacccggcgatcgtcaaaaatgtacttttaccggcgcctgaaggccccataattaaaaccacttcacccttattagcctgaaaattgatatctttcaaagctgcaactttagcttcgcctttaccataaactttattaacatcttttaattcaattactgccattttactcaccaattgcctttgctggatcaaccttcaaaattgatctaatcggaatcaaactaccaataatacccatgactagcatccctaacgtaccactaatcataattgctggcgtaaaagtcattggcacagctgctggtaaagttaaatcagttaaccacatcaagataatcgcaattacaacaccaatagctactaaaattatggattgactgatcgttgcaccaactaaagttttacttggaattccttgagcccgcataacggcaaaattatgcattttttgcatagttaaaatatataggaaaacagcaatcacgatcaaagaaataacaaataagaatccaatcatcaattcaaaagttaagttttgagccgtatatcctggaagcttattaataaaggcttgaattgggtatgtcttggcatccttataattgaatttataattgctattctttgaaacaactgcagaagcggctacattaggagcgaccatccgcagttttttccaagttttcattgagccataaacaattggcgcaatattaatcttggcgttatttacaaaaccaacaattttatattttttcttagagccattcagagaaatttgatctccaagcttgtagcctttgtctttgaaactactgtctactgtaatctgattaccattctttgcttttttcccagcaattatatcttgatcttgataaataaactggtcttttttgatgcctaagaattgagctgaaattgagttttttccctttttcttaactacaattcctaattgaccaataattgcttcattcttgccaatttttgcgttttttaaatcgtcttttgtcagaattgactgactcatgctgatattggcatttttatttaaaacaatcttttgcgcattccaattttcaattgcttgtgtattctgacttgctaacccaacagccaaagatgacaacataaaaattaagtagctgatcaaaaagatcatcaaaataatcaagccatagcgcaatttttcatgcttaatttctttcagtgctagaaacataactacatcccctttgctagtatgtccaggctcttcttatagcgcgccaagttcttttcctgattttcgggatctgataagcataagttgataacttcatgactaagtaccatggcactccacaattgtggccccatattcaacaattgtcttgaataaattttgaaattatgtggtatcaagtactcattttgcgacatatgcaatttcatcattggttcatatttactgtattgaactttatcaataaacttaactactcttgcataaaaatgattaggatcaaatttttcattaggactcatcctagcatgaatgtcttcaatagcgatgtgatacatataaacatatgcatcaattaaatcatcaaaatatttataaaatgctcctcgagcaatgttggcattcttaacaatatgtgacaccttagcatctgctaacggataagtgctgaattcttctaacaacaacgcttcaatacgtctacgtttagcagacggtaaatttttaaaagtttgcttaaccattttgttttccccttttccaacacaaatgacgacttgtcatcaattacttatatcatagctgattgtgacgagttgtcaatacatatacaaaaaaagaaggcctctgccttccttctctaaactaaaactcgattatagtagtacaacctagcaacaccatcacggacgctaaatttacttaatgcacaattatttggcgtatctatcttgtccatgtcgccattactcaaataatgagctgccatcattcgaatcaaacgaccatgtgccactactaataccttaccttctggatatttttgatatatttcgtctaaaaagttagcgcaacgtgcttcaaactcttcgtagccctcaccatttttggcatatttaacatagttgcgagtaacttttccccatggatcaacaacatccggatattccttagcaatatcatccatcttcttgccgtcccaatcaccaaaatcaaattccagcaaacgtttgtctaaatttaatttctttttacctttagtaaaaattctcgcagtctctactgctctcttcattggactggaataaacaacatcaaatttattttcatcaaacttagcggcggattttttagcatattcacgaccaaattcattcaagtctgcgtcaacttgtgcgccctgaattcgattatctttattcacgtctgtttgtccatgacgaataaaaactatttccattttttacatcaccttttcttaaaatcatacccttatttaactaatctttccatttctttactgtttttttagcgttttgaaatttaaaaagcttaaaatataaatagataattagaaaggggaaacattatgtcccgcgttacaattgaaagagatggtctcaccttagtaggagaccgcgaagaaccattcggcgaaatctatgacatggctatcctcatgcatggttttaccgctaaccgcaacactgaattattaagacaaattgccgatgatctacgcgacgaaaatgtcgctagcgtccgttttgactttaatggtcatggcgaaagtgacggcaagtttgaagatatgactgtgccaaacgaaatcgctgacggcaaggcaatcttagaatacgttcgcaccgatccacatgtacgtaatattttcttagttggtcattcccaaggcggtgtaattgcatcaatgcttgccggtctttatcctgatgtgattaaaaaagttgtccttttagcaccagctgctcaattaaaagacgatgcacttaaaggtagcacacaaggcgcagtctatgatcctaaccatattcctgatactgttccactagtcggcaataaattaggaatgaaactaggcggattttatctccgaaccgctcaagttttaccgatttacgaggtctctgcccgctttagtggcccagtatcagtcatttatggtactaatgaccaagtagttaaccctaaatatgctaaaaaataccatgatatttatgaaaatagcgaacttcatgccattacggatgcagatcacagattcactggtcaatacaaaaagtcagcatcagatttaactgctcaatttttaaaaccattattttagcgccgagtaaagtcgaactcagtacgaaagacgtaatgatccttagtacttacgtcaggttcaaattgaaattcaaaatcattaaagtcctgcaaatctgtgggattttttatttgcttctcggcaatgtagcgcaccatttcaccacgagccatcttagcgtgaaccccaacggtcttccacttaccattttttagttcctgaaagtcaaccgtaattaattgtcgtccttgactcaaataaggtttaaccaaacgtgtatattgcttggaagccaaatcgataactatattatcttcttgaaataaattttcagcgatatcactgccccagaaataatacaagctataatcacgaaaaccaaccattttagtatttaattctaggcgatatgggcaaacaccatcaaaaggccggagcataccataaaatcctgatagaatccgcaaattcttttgaatatagtcaagtgcaggttgtgtaaataaatccggagccatatattggtattgaattcctgaaaaagccaaaattgcaggggttaatcgttcatccaaattcatattttctagttgcaatatgctttgcttagtcacattttcactagcatgccaaaggtcttttaactgttcatttgaccttgacttaagaaatctttctagaattcgtgtcttatccaagaactgcggttttgactgaattggaaatgaatcacgatcaattttcataatttttgcaggtgcaataataattttcatttttagattttgttcctttacggtaaacttaaattgtgattaataaggaggaaaaataatgaatcctgattttgcaattgtcttaaattatcaacttaatgataaggctgatgccgactttttagtaaaaacagcccgtaatatcggtgctcgtgcagtgatgactgacaggcaaactgaagatttcaaaacagcttgcgctaagtatactatttttttagctaatccagaaaatagtactgacttaactaaggataacgtcattgataccatggtcaataaccgtaaagctggtaagactacaattattaatgtgcccgttgaagcaggcaagttttctgccgcaactcaagcaatgctggatacgatcaatgattggatgcaccaattcggtcacgccttcaacgaaggaaaaactagtgctttaaccagtagcgatggctttattttagaaaatcgccacgcaaattaccaaaaatatgtcttcttacctagtcctcttcctgacaaaatcgtggtagaaggcctagtcgaagaacctaaccgggtagaatggattgaacatcgatctgatcttgattttaactataaggatcaaaaattaactattaacttagtcaaaccagatgatgagtttgcttggcaagtgttgcgaattcaagcccaccgacctgaagatgacattttagaaacgaaattttagtaaaaaggcgttctttgtagcagaacgcctttttacaaccttatgtaattgctatttctattttccaaaaaatttattcttgcttaagctttaactactgaaccattatcaaaaaattctctaaaacgacgtgcttctttatccagagtaatttcatcattaacttgcgataacttatagccaacaaaataaggtggcgcttcaaaacgtgtaatatatttagcacaaataccgtcatcattacgcggataaaagaatagattataagaatcgcagcggccattatacatgatatttaacaaatacttggcaccactttgaatccagtcagcccacaagtcaatgctatttttatctaacaagttaatattgagctcagtgtagccttgaacggggtgttcagcaatgttaacttctaccccacttttttcaaaaagggtctcaccttcaaaattattcgggtgaatatatttatagccatcttcatgttcaaagccaactatctgcatatgcgggtgaatcaaggaaccacctgaatgtggaccatagttcttgtaccaaacaattgactcatattggtcactagcctgcactttttcaaaacaagctagcgcaaaatgcatcaacttgcgattatgttcctgcgtataagtactaatatcgccgttatgatcactagattcaattagtacagtctgccaggtatcgcgcaaggtcgggaacttattcttaagccaaatcatgtcatcttccttggcgtaaatatcagttaaattttcaacatcacaaaatgggcaaacgtttttcttcttatccttacgataagattgcggtttgcctttagcaatgctcatttgaaaaacaagtggatcattagtcatatttattccttttttttatttaaaatagtttaaaatctaatgggtaaagttttactataatgtaaaatattttgtagctttactagcataaaaatacttgttatactttgttaaagcaaacgtttattcgaaatttatcaagagacgggttttaataatgcaatctagaacagaaatgagaaagcgaaacaatcgcaacaatctctatcttattattattggcataattgtcgtaattgcaattatttgtggctttgtcattcataatcaaagggtagctgctgaacgtagccagcgtgaatatgcttctacccacttcaaccctaatgtaacaatttatggtgtgcaagtaggcaagcttactgttaacaaggcgactgctaagatcaataaacaagctgataatgtcgtctttttaagaaataaaaagattattgctgaaaaagacgacaaggttcaaactatcagccaagctgaagttaaaaatattttcactaagcagcatactgatttgccaagcaaacaaaaatacgttttcaaatccgccaaaatagatgaagcaaaaaagagtttgcaaaaaatacaaaatgctgtagtcacctataagatcaatggccaggaattcaagctaaaagctgatgacctaattcacgaagttacttacaaaggtggtaaatataaattcaccgatgtaaaaaaactgcatgctaaaatggaagcgatcgatcaagaagtcaaaactctaaagaagagttataaatttactgttcctactggtaacaaagtcaatggcaaaacgattacggtaaaaaacgaaagctatggttggggaatttatgtcaagaaggctgtggctgcagtagaaaatgcttttattaatggtcaagatgttgttgatggtagtaagtatatttatggcgagggttatagtacctatgctcatggttatggcaagagcaatcatggtattggtaaaaactacgtcgttgtctccatcaaaaatcaggaactatgggttgtccgtaaagggaaagttgccgttcacttaactgacgttgtcacaggtactgaaaataagagtaacgctactcctaaaggtgtttggtatatcatgtacaaagaatcacctagcgtattgcgtggttataacgacgatggctctaagtatgcctccaaagtacaatattggatgccatttactttgagcggctgtggcttacatgacgctagctggcgtagcgattggagtaagtcagcctatcttactggtggctcacatggctgtgttaacattcgtccagctgaaattagaagtgtttggaacaacgttttaactaacgatgctgttatcgtatattaaaaaataaagattaatcgcctacttcaattgaagcgggcgatttttttgcgtaaaattaacagaaaagatatagatttttgaaaggatcaaatatgttagtcatcggtattatttgcttggtggttgctgccatttcttactttaaataccttagtgaaaagaacggacaagctaaccaaaaacaagctgaaaacaaaaatgaggcaaaatggcagcgcactttagcaatcattttcctcgttttcggaattttattaatcggttattggattgcattacgctaaaaaagacgtgaattttcacgccttttttaaatataattgattaccacattacccatattagctcttccctttaaaactaaggtaggaccgccgccattgctttttcctttaactattacattaccaaggctaatgcttaattgattatcaatctgccatgataagggaacgtagagatttacatttcccattgaagcagttagattaagcacgactgtatcacctgctgctttagcatcatcaagatagatattggcattaccgaatgaagcttcaagattaattgactgtaaattttgtgaatgaatataacgtgaagaatcgccagccatcttttgattaattacgatattgtcaccatcttcaatcacatcttgaacatgatgatgtgttacttttgtctctgtatcagcatcgtcactatcatcgtcatcattccaataaaaactcttcttgataacaatttccggatcttttttaaaaagcaagctcaatcccattgaaacaagcaaagcaataaacaaaatcatccaagaggataagaactttttaatgcccaggggacctgcataagtaattactaaaaaagcaattgagaaaacggacaccacaatgctcttatcaagcaagcccttaattaagcaagccacaaaaatgactgtcaaaataattgtccaaacgctaattttgaagcttaataagcctaattgactgatcaccaaaagcgcagctgcagcgattagtcctactccccacaaaattcttgcaaaactgtttttcattataaagaccttctttcatctaagcgtgtgcgtaattctttgtagtatcgacgggatgcatatacagttttataagtatcatgaaactgtatcttgcaatctgaaatcgaccgagttaaaccataaatttgatctaaattaataattgtcgatttggaaatccgcatgaaacctgcgcccaaaatattttctaactcatacaatttatgtttaaccaagtatgccttatcttgtgtatgcaaaattacctgcttggcatctgtttcaaaaaacaaaatctcgttcagtggtaagtagtaagaaacattgtttctaaaacattcaatctgatcattgtgttcaataccttgtaatttcttataaagctgctctatttccggagaaatatttttagctttaataatcagttcatcttctacggcatctggatcaatctcaagttttactttcatgtttctcactcccttctgaatctgatatttatattaaaaaatatttcagatagcttttccatagttttgaactaagtggtaacttttggtttctaagtggcaaaaaaataagacgacctctgtcgtcttattgcttattatcaatgtaaactagtaaaaaatgttatcagtccaagatttgattattttttgctttctactgcatagattaatacttaatagaataatatatgagcactactataaaagatagtatgacaaatacgctagccaacgccataaatgaaacattaataattatcacgctacttagctttaagtaatgttgactcatcacaacgatgatcatccataaaccgatgtttaatactacaaaaaactcaattactttaaagtttaaaacagttacattatatttttgactagatatcttattactcttataccccagtatatttatattctggttatgctgaattgcacgtatgaaatattgggaaacatatactaaaataacttcagcaatactaaacaaacctagaaatatattgtgaatccacattacgtttatagttaaaatacaaactatggccaataatgcaattatccaaaaaagtttgtttattaattgatatgctaagtattttatatatttttctctatccattaatctttacctttgaaactgtcaaatcttttgtgtaaatagatctttctcgtaaattgattttttaattatttatttaatcaaagtaggattctaaggtgtcctgaacctgaccaaagcctttatgaattcgattgaaataacggtcattgtagctcattgcctgaatgccaataaaagcatcaagcgactgttcagttggaaactctgccttaggcttagctttgcgcttgatcacattgttaaatgattcaatcatgttagtcgaataaattgaagctctgatctgcttgggatagttataaaagaccagcagatctggttctatgtctttcaagcttctgataacatggctgtaaaccttgccccatttggtatagaagtcatgcaggacagctgtggcttcttctttgtttgtctgttgatgcacctgtttgaattcgttcatgatcttttcacgatcgtcgacgcgtactttagcgcagatattgcgcatgacatgaaccaaacagcgttgaaaatgagctttaggataagtcctggccaaggctgttttcatgccaacaacaccatcagaaagaaaaagctcaacttgctttaagcctcgggatttcatgttttgaagcatatctgtccagacttcaatgttctcgctaggcgcaatgcagtagtcaatgacctccttgtgcccattaggcttgatgccaatggcaatatagactgcttcacgctcaaatgtttctcggcgcaaaggaaggtatgtcgcatccaaatagacgcagaaaaacttgtcgcttagcttgtggtaagcctcaacctttggaatcatctgcttggaaatatttgatacctgagctggactgtaatggctgccatacatcttttcaattagatcggctatttccctggtggtcacgcccttggagtaaagcttgataatcatgctttccaagatatccgagtgctgcttgtagtcaggcagcatgtgctgatgaaattgaccgttgcgatcccggggcacttgcacttcaattgggccaaattgcgtatcaactttgcggaaataagcaccatttctagagttgccagtattccagccatttctggcatagggatcatagcccagaaaggcagtcaattcagcttctaacaagttattaacagcctgttgtagctctttgcgcaataaatcatttattttgtctggattgaatagagcttgagcaaaatctttggtaaaatcattcatgaaggagttcttctttctgtatgtgtttttgtgttcaaaccaatcatacgagaaaggaactcctttttctaatgtttaaagaaataaatttaaggaatcattcatccttacacaaactattttacagtctcttaactaaagattgataaaaagaaaatataaaatataatgttaacaataaatcacaaattctaaattttacttttgtaatcaaataaaagcttaaataatcaaaaaacacccatacgattaaactaaatatacttacaataagcgttactaattctaatttcatatttccaccgttaattagtatttttagcacatcttaaataaaccgactatctttcagtatagcatcctcagtttatatgtaacaaaaaaggattctatccaagtagaatccctattttagtggacaccctccattagtacattaatcttcttaaccaagaaaaacataatcacggcaaaagctacactaactaagccaaccgccatgaaatattgtacttcagtgccagttgaatagaacttaacaatttgtgcattcactgcttgtccagttgcatcagccatgaaccacatactcatcatttgcgaacgatatgcattaggggctagcttggtcgtaattgataaaccaattggtgaaatcaacatttcagcaatttcaactaagaaccatgaaccaactagccaaaatggactaaccttgcttgctgtaccataaagcatccctggcaaagccatccacatataagatagaccagcaaaaactagccctgctgcaaacttgcctggagctgttggctgctttttccaatgttcccaaagccaaacgaagattggcgttaaaatcataatgaataatgggttaagagactgaaagttggctgctgtaaagtgccaattaccaatatgaagcacggttctttgagcggcaaacagagctaaaactactgagcctgattcttcaatgccccagaagatagctgcagcaaagaacaatggaatgtaagccttaactcgtgaacgctcaaccttagttacttttgaactacgtagcatcatcacaaagtaataaattggcagtgcaattgctaaaatagtcaataaagtaatgacattgtcaacgttcaattgaccaaagccggccattgcagctaatacaagggcaatcaccacgaacccaataactacccacttaataatattaagcaagtcacccttatcaataggatcattaggcgtcaaactttcaggagaaaggtattttttaccgccccaaacatattgcactaagccaaagaacatcccgattgcagctaaagaaaagccggcatggaagttcatttcattaccaaaaatatgaaagccaaaaccttgtgctgcccatggaactaaccaaggtgcaagaaatgatcctaagttaatcccaaagacaaagatgctaaaacccgcatctcttctgcgatcttcaactgaataaagaccaccaaccatgtcagatacatttggctttaataaaccagtaccaaccacaattaaggcaattgaagcatataacgccgttacaccggctggaagtgccaagacaatgtgacctaacatgatcaaaacgccgccataaaagacggtttttcttgaaccccaaacacggtcagacagccagccaccaactagggttgataaataaacaagtgaaccatagattgacatgattgatgcagccgttgtttggtccattcccagaccacctttggtgactgcataatacatgtagaaaagcaggatggcgcgcattccgtagtaactgaagcgctcccacatctcagtaaagaataacgtggacaaaccctttggttgtccgaaaaatgctgtatctgaatctcgtttacccaaagaaaaactcccctcttatctaaggtaagcaataaaggatattataccacgaaaaataaggatctacttcttacatcaatgtcattaagttaagattgacaaattgaatctaatctctgtagaaccgaatcattatgatttagttctttttttgcataaaataaaggcgaaaagaacctaccttttcgccctctgattaaattattaaaccttcaaaattattgccagaaagctggtgttaattatgaaagcccttcataaaaatattttagatcgtcttgatcaaattatcaatgatactggaaagcatattcatgattttatcgatgatcctcatgccttcactaggaagcggtctttagatgcagctacagtcattaaaactactattaatatgcaaggaaaagatttgaccagtgagttgtttagagcttttggccaaaaagctattaaaaataacgataaagtagtcagtacttccgcttatgtccaacgcaaaggttcacgccgttgacatgcacaagactgacctggacggcaaggaactgaccagctacaagctgcaaaaggacctgcgattccacttcgacaactagtacaataacagaaattagccaatatacagcaaagtgtctgggaagaaactcgatttttagcccggatataaaaacacagaaattcattatttttagtgaattcctgtgttttttgtttttgaaatgaaaattcgaaggcttcaccttcttgttggctccatattttttcttaaatgcgttctgcgcataccaaatacactcttcatgtgcccaaaaattggctccacatctgacttgcgacagccatagatgcgtttaccttattcgctttgaagagtctcttttgctttttcttttaaatactgccaattaggattgtagtgaatctgtctttgtcgacctgttttggttttagccaattgggtcagttcttcagttagctggaactcatcagcttcataaattttgaagtttctgaccatgccagtaaatcgatcttttctttgactataatatttgaagttgaagcggacgcctgatttatctacgtaatagtcttcttcttcgttatagtaccagttgtcgacctttgatggatctttcttatattttcgcgtttgttctttttcgtattgggtatacggaatctgatagttcttatctgaataattctcttccagaatcgagtaattgtattcactgccatagcccgcatcggccacaatattttgaaacttatcgaaaattcctctggacttcatttgttctagaaatagttcgaatattctaaagtcagccggattaggaaacagggcaaaatcaactatatattgattagtagtcgctgcctgaatattgtagcctggctttagctgcccgtttttcatatgatcttctttcatatgcatgaaggtggcatcatgatctgttttagagtagctgttacggccagcaaagatctcttcagcttcttcgtactttttagcacgcggaataaaatcttttctaagtttatgtgcgatcttctttaattcacggcgcttggccttattttttgatccgcctggaatggctttaggttctcgatcaattttctcggtcagcttctcaacttctttttccgtttcttgagccagaatctctaagccttgactagtttgggcttcttcttcggccatggctttgactacttctttattgatcagttcttcatataaagcagacacgtcttcctttaacttggcatgatacttctcaatagcttttcgccagacaaaagtgtacctgttggcgtccgcttcaattttagtaccatcgataaaaactgcattttcacggattaatccctcatcttctaataatgaagtaaagtagacaaaacactgcttaattaccttattggcatggtcgcttgatctgaaattattgatcgtgtgataagaaatctttctattgtcagctaaaatcatcatgggcagattctcttctagcattctttcaatttttctgcctgaaaaaactcttctagaataagcaaagagtaaaatcttaagcatcattgccgggtgatatgcaggtctgcctgtattagaagtggtttctaagataacttcgttaggaatagaatcaacgaattcactgataacactggcaatgtgatttgcagggatagaaaaatctaaatttaatgataaagtagtttgtcctgtgatataattttgatacatgtttaagcccactttctattgtttttttgtggtgattaaataatatcaaggaatgggtttaaagtatacaaaaagagcgatgacttcttatgaagttcatcgcttttttcatggcctggaaattagttttttcccagacactttctattattaaactagatcatacatttctggcattctgcaccattttgaattaaacattcgtctgcagtcaagttctcactaccagctaaaactttttctcttattctaacataataaattgagttgcatcgctttttaaaggcataaatataagccttatttaaatctcttgttgttgcattatcttcaacaaataaagttaacgaaattgattgatcaacatatttttgtgcagcagctgtaatatcaataatagcattaggtcctacttcatatgcgcccttttcgtaatactcataattgtctttattaatcttataagctggtacataaattcgacccaaatcagcctctttgcgtgtttcaacaggagctactactggctgcaaacttggtgtacatgaagataaataactaattgatccagtaggtgcaactgctaataagttagcattagctatacctgtctttttaattttagtaatcaattcttcccaatcttctttagttggaataactaatttatatttagctacaatttctttaatcttgtctgttttcggtgagacttcctcatcaataaattttttgaaataatcaccactagcatatgatgaatctttgaatcctttaaaagcaccatacttttcagctaatttatttgattctttaaatgcatggtatgcaattgtataaaagaaaattcctgtaaattcaactgcttctggtgaatcataataaatatgattagttgctaaaaagccatgtaaattcattgctcctagaccgattgctcgattagctttatttcccttttcaattgaaggagcacaatctaaatctgaagacctggcaacacgattaagcgcttgaacactatcagaaaccaaactacctaacttgtcagcgctattcattgctgctgcaatattaagtgatcctaaattacaacaaacatcgtagcccgtcttattaaaacttaagtctttattataggtacttggtgtattaacctgagcaatttctgaacataaattagacatcacgatccgccccaatttcttttgtgggtttcttcgattgacagtatcttcatacataatataaggataccctgattcaaattgaacttcagcaatagtttggaagaattttctagcactgataaatgtctttttaatacgtggattattaaggagattttggtattctttagtaattgaaatatctgacattggtttaccatattcacgtttaatatcatatggtgaaaacaaagccatctttttattttctttggctagttcaaaagtaatatctggaatcactacgccaagtgataaagatttaattcttaccttttcgtcagcgttttctcgtttagtatctaaaaattgcataatctggggatgatgggcacttaaataaactgcaccggcaccttgtctttgccctaattgattggcataagaaaatgaatcttctagtaatttcattacaggaattatcccactagataaattcttcatttttttaataggtgcacctaattcacgcaaattagttaagcatagagcaacaccaccaccacgtttagataattgcagacttgtgcttattgctcgtgaaattgattccatattgtcttcaactctgagcaaataacatgaaatatattcaccgcgtctctttttacctgcattcaagaaagtcggagttgctggctggaaacgattactaataatatctttaactaaattcaaggccagttcttcattgccatcagctaaaaataaagcattcataacagcccgatcttcaaaacgttctaaaaattgtttattatcgtttgtttttaaggcatatgctttatagaatttagctgcacccataaagttcaaaaagctaaaattttgtgcataagctaatttgaaaatttctttaataaatttagctgtatataaatctagaacttttttatcatagtaatcattatcaactaaataagctaatttttcttctaaagaagcaaactttttcattcttggttcaatatgattttcaagatattgcttagtagcctccttgtcagctttaaaattataatttcctttttcatctttaaatttagcaagtgcatttaaagaaatatatgaatcattattaagattatcagtcattgtcttcacctgcatcagcaattattttattaacattatttacatcttcagttgttcccagtaactcaaatttatatagataaggaacatgtaatttcttagaaattacattccctgccaaggcaaaagaattaccaaaattggtatttccactagcaataacaccaatacatttttgccgattagccaatttgttcaaaaagtggataacttgcttaggcacagcacctgtagtcccatggccaccagaataagttggcgtaattaaaatatattcttcagaaactgaaatttctttactgaggttaataggaatcctaatagaattacaatctaacttttcgacaaagcgtgctgtattatttgaagtggaagaataatagacaactaatggctttttagaaatcccagtcatcatctttagtctcctctcctgttcccatgacatatgaagaaccattaccagaaaagaaatcatggttttcatcagcttgagctgataattgagcgaatacttctggagaaacataagtttcttctgcggtaaaaggagaatcatagcctaaattttgtaaaaatttacctgcattatacaaactgaaatgaattgcatcatcaaccaaatcaaaatcatcataaagctcgtgcaaatatttcttttccaaatcaattagtttatctaagaaatcaaaaacaaattttttcatttctgcttgtttagctggagctaatttctttacggccaattgatatttgtaaccgctataataattgtgaataaccttatctcttaagatcaatctaataatatcagcagtattaggcaatttacctcttgcagctaaataaaatggtaaataaaaaccaccataaagcaggaaccctggcataattgctgcggcgacctttgatttaagcggatcattgcctgtataatacggaattaccgctttagctcttgcttgtaaagtatcattattaactacccattcatgcgcttcttcaatttgttcactagtacataaagtagaaaaaatagttccatatgatcttgcgtggacagcaaccataaaagcaaaatttgcatagatagcttgctctatatcagtttgtgaatttttaatttgggctacatcacccacacttgattgagttgtatctaataaagtcaatccagtgaaagtgcgagttataagctgttgccagtcatcagataattgattccaagaacttatatcattcgaaactgggattttttcaggtaaccaaaagttttgagtaactctgttccaaacctcaagatccttatcatctttaatgtcattccagttaatagctcgcatatttttgccgttgtcattgtaagcaaattcaactggtgactgtgaatgatcataataactcatatatttgctcctatcattatttattgttttatctaatatatgtgtaaacatactatagcatcgtctgctcaataatacaacatgtggattttgggggttatttataatcgatatattgtggttaagccgttttgataatacaaaattattttcaaatttattttatcttccaaaaataatgtaggtgttgttttttgcttttttgacaaaaaaagtgtctgggaaaaaagtcgatttttaactaaatttaggctttaactcaaaaaaatcccattaaatcaaggtttgtatgtaccaagatttgatgggattttgaaatttctgagttttttcccagacactttcttttgcgatttttgctttatttgttagtaccatctgctcctactggcagggccgggaaaataaccgtgaaggttgaccccttgcctaattcgctttccaggcggatggtcccgtggcactgctgaacagcatgcttgacaatggacaggcccagaccagtgcccccggtcttgcggctgtggctcttttccacccggtagaagcgttcaaaaatccggttctgggcttcctggggaatcccaatcccagtgtctgctacctgcaggatcgcctggccccggtgctccttgaccgtaatcttggtcttgcccttttccttgttgtagcggatgctgttgtcaatcaagttgtaggcaatttcataaaccaggcggaagttggccaggatcatggtgtctgacaaattggtctccagcttgattccatgccggtaagccgaaccctgcaaggcttcccaggcctcagtcaccggactcttcaagttcagcttgatttcttcaaagcgctggttttcatccaagtgggacaaacggatgatatcgtcaatcaaggtcaaaagctgggcggaagattcatggatcttcttgtcaaagccatcccggtcttcgtctttgaccaggtggttttccaaaagctcagctgaccccatgatggactgcagaggcgtcttaagttcatgcgacacattggccgtgaattcccgccggacctgctcttcatggtattcttccgtcacgtcaaccaccaagatcgaagtccccttcaaaatcttgcggctgataatcgggctggcactgatttgaatattgcggccgtttctttccacaatcccctcagtatgagccaagcggctgtttttatcgatgatttccttaacatcgtctggtaaggggtcagtgtcatgcaggcctaaaagtgaaactacagccgggttagacaaaagaatccagtcatccaggtcaatcaagatcaagccttcttgcatggcatctgttaccgtctttaattccttttcccggtggtgcagctgctccatttggtcagcgatctgcttgttctggctgtccagcctggtcaagagcggcttgatttcatcataagccttgctttccaggggcttgtccaagtccatttcattcagcggcttggccaggaaccaggacactaaaaccgccaaaagcatgatcagcaaaagcggcgacaagagcctgagcagcatccgccagaaggagtttctggtgatcgcgatgcggatgaccccgccgttattgagccgttcagcgtagtacatggtcacggtcgacaaggtcgtgctgtagcgctcgctggtccccgtccccttcttcatggcttcggcgacttcctcgcggcgggcatggttgcccatctttttgggattctcttcattgtcgtagagaaccttgcccttggaattgatccaagtaatccggtagttctccccttttaagttcttgaggtacttcttgccgctggtatttaccccgctggccgccaggtcagcctgggaagctagggcagacatttctgtatggtcgaagtcaatgctcaagacaatcgtgcttaagagtacggcaaagaagagaaccagagaagtcagtaaaaaacttgcccgaaatatcttcttaaacattagtctgcttcatggtagcgataaccgaccccgcgcagcgtttcgatatacttaccagcctcacccaacttctgtctcaaggttctcacgtgaacgtctaccgtgcgcgtttccacgtaaaaaccagtctcccagatctgatccatgatttcttcccgggaaaatacagttcccggatgagtaatcaagagctttaggagtccgtattctttcaaagtcaaatcgacctgacggccgttttcgaaaacttcatggcgctttaagagaatcttgatcccgtctttttcgatcttgtcctccttcttgcggttggtccggcgcaaaacagccttgacccgggaaaccatttccatcatcccaaatggcttggttaagtagtcatccgccccggaatccaggttcttgaccttgtcatattctgccgtcttagcactggcgataatcaccggcaagtcctcggtcgcggaagtatacttgagccggtggagaatttcgctgccgtcttcatcaggcagcatcaagtccaaaatcactaaatccggccggttattgtccaggaccttgaaaaaagaatgtccgtcttcaaagccgcggaccttgaagttcattgcttccagcgtgtacatttcgatttcgcggatgctttcgtcgtcttccacgcaccaaatttcagtcataaaaaatccccttagcctttcttaaacttatttatagtttaccatttacaagagtgttaaggggtatttcatgggattatctgccagtcttgccggtagttacaaataaggaccatttagcaatattgacggcgtgatcgccgattttttcaaagtacttcgcgaccatcatcaaattgatcaaatattccggattactatccttgttaaagttatcgatcaaaaatgccttcgctttgccaaagtcgtaatcgacctgatcatcgcggtcgattacggctttggccagttctacattctggttggccaaagccgttaccgcgtcgttgaccatacaagtagcaatttgggacatgctcttcaggttcagcatgtcatttgcgtctgagaggtgttctttaaggatcagttcggcaatgtccgcgccaatttcaccgattctttcaaggtcgtagaccgccttcaaagatgcactgattatccgcaagtcagtggcaaccggctgctgctccatcaaaaggcgcaggcaggtttcttcaatgtcacgctctgccttgtgaatccggtggtgcaggttaatcgtgtcctctgctttatggtagttgcccgtaaacagggcgtcggttgattcagaaatgctttccttgcacagctggccaatttcttccattgcttcatgcaagtgatccagttccttgtcaaatcttgttctcatttttagcctcctatagccttaaccgaaccggccggtaatgtatttttcagttctttcatccttcggcatggagaagagctggtcagtttcaccgaattcaaccaggtcacccaagaggaagaagccagtcttgtcagagatccgcacggcttgctgcatgttgtgcgtaacgataacgatcgtatagttcttcttcagttccaaagctaattcttcaattttagaggttgaaatcgggtccagggcactggtcggttcgtccatcaacaatactttcggcttgacagccagggcccgggcgatgcagagcctttgctgctgaccgccggacaggcccaaggctgatttcttcagccggtccttcaagtcgtcccagatagctgcttgcttgagggaagtttccacgatttcgtctagttccttcttctcagtaatcccgtgaatccgcgggccgtaggcaacattgtcgtaaacgctcatcgggaacgggtttggtctttgaaagaccatgccgactctttgccgcaggacggtcacatccaggtcaccgttatagatgtcagtgccgtccagcttgatcgagccatcaatccgacagccttcaaccaggtcgttcattctgttaagtgatcgcaaaagagatgatttcccgcagcctgacgggccgatgaaggcagtgacttcgttctttggtatgtgtacattgatgtcatgcaaggcatgaaaatcactgtagtacaggttcagctttttaattgtaattttgtcttccatcattaatttcctccgttattgcgcttgcgcattctgtcagagatacggcgcgtaaccaaagtgaagagcagggccaaaacgaccaggactgctgatgtaaagttggcaatctgagtggctgacgggttcaaggccccttcagttctcatggcccagatgtgcagggacagggtttcaccgcttcggaacgggttcaggggtgaacttggtgagataaccttccagaagttctgccagttgatgtaagttgactggccggaagtatacaaaagcgcagcggcttcaccgaagccgcgcccagcagccatgattaccccggtcaagatctgcggcatggccgccggaatcaagaccttgcggatggtttctgacttggtcgcgcccaggctcagggaaccttccttgtattccaccggcaaggaccggatggcattgttggtttcagtagttatcagaggaatagaaagaattgaaatcgtcaaggcaccggccaagatattccaggacatcccggtccacatgatgaaggccaagtagccaaacaagccgataacgatagatggcagggatgacaaggattcgatactgatttcaaatattgtcaggaacttgccttccttggcatattcagccaggtaaaccccggccccgatgccgattggcactgagaccagcagtgagaggaaaactaagtaaatagtgttgaaaaactggttgaaaatcccgttgccggctgctcccaagaagtcccactggaagcctttcaagccgtcaaagatgattgtcagcattaagtagagcaggaaggccagcataatccagccgatggcgtagaagattcccgtcatcagccggtcttttattttagcacggctcatatttatttttccttctttccattgccaagcttgtgaatcaatataatcaaaacgattgagatgacgaagagcaagagagccattgaccacaaagccagattgtattccccgcccttggccgtgttacccatgtcagcggcaatctcactggtcaggttgctggttggtgacaagagactggtcgcgaaggaccgggtcttaccgataaccatggctacggctaaagcttcaccgatggcccgggccagacccaagaccaccccggtcaagataccgccggaagcggctggcaaaacaaccttgccgatgacttgccagcgggtcgcccctaaaccgtaagccccttctctgtagctattcgggactgacttgatggcgtcagcggcgacagtagtgatcgttgggaaaatcatgatggccagaacaattgaggcggccaggactgagaaaccgcccatctttgggtggaaggcgtttctgattataggaaccagcttggtcaagccaaaccagccgtaaacaacggatgggatgctgacgtagatttcagttgccggccggaagaacttttcgccgatttttggtgaaatttccgtcatgaaaacggctgagccgatcgcgaacggcaggcagatgaacaaacccaacaagcaggtttccagggaaccaacgatgtaaatggcagccccaacttttcccccgaacatgccggtcttgtcaagcggtgcccagtcactggtaaacaggaactcccaaacgctgtggtgcgccttaaggaaagtctggctgccttggtagagcaggaaggcccccataaaaagggtcaaagcaacgatcaagaggccgcaggcgatgtagtccgcgcgccagcgcttgtctttggcaattgctttttgaactactttgtccataatgctttatttctccttcttacttattagcatgggtggctttagcggcagccagcagtttggaggctacgccgtagcccatggcttcgatcttcttgctatattccttgctaagcatctgctgcaagaatgccttggcagcacccttgggctggcccttagtgtacatgtgctcatagctccaaactgtatacttgccattatagacattcttcagggttggcttaacaccgttgattgacacgatgccgacttgcgggtcaccagtcaagtaggacagggaaacgtagccgattgagccggaaacactttggatcatttgaaccaaagtacctgagtcgtcagtttccagagactggtttgactggctagcgtgcttcttcaaagcgtattgctcaaaagttgcccgggtacctgatgaagatggtctggaaaccaggacgatctggcagtcattgccgccaacctgcttccagttggtcaccttgccggtgaaaactttgatcaactgttcagtggtcaggctcttgactccagcatccttgttgatgatcggggcgatggcggtaatggccacttggtggtcaactagcttgctggctgacttcttgtctagcttttcatacgcgaacaagtctgagtccccgatgtcgatggtgccgtcagaaacctgcttcaggccttggcctgacccacccccgttagtgttgatgacactgtccgggttcttgtccatgaaagtcttggccgcgctctgcgctaaaggcagaagggcagatgacccggcgatgttaactgtcccggaaactcccttggtatcggctacgcagctgtcgatgacgcagccggtgacgattgccagcaaaacaagtgcaacgatggcgactttggtttttttgcgtgacatgttaattcctccttgaattcttactgattcaaccttaatggaggcaagttaaatgcattcagtgatgattgttaaatcaatgtaaaatgtttaattttatttaagcccagccgctttcttaacagaattacaaagttttcgcaaggctcccctttacttttcagtttattttgcttaatttatccgttttttacatttgtaaaatatagagctttcactctttacaccttttacatatcgcgcaatattaggatataagtgttcttcttcagtccactcaaagaagcgtttaaccgcaactatataattctggattgtggtcggtttcttgccacttgcctttaaaaattctctgtactgtcttacagtgtcgggatctggatgcgtgatccccttttccctcatgtagataaaccattgcttcaatgaagttcgataagtcctaactgtattaagcgaaccatcaataaatatgacaaacttatcaaaaagatcatccaagttgctatgctgaaaatccaactgctttgagcctatcgaggttaccagttcaccgcttatttttcttattggttttatttctaccatcctaacattcacctactttgttactatgctagcttattacattgttatcttgctatattgctataccagcattgtattcttgtagtatcagattacttcagcataatgttacatttttgtcccctaatatgacttcgaaaacgggcttctaagcttaatatacttgttatatgttcaatttattcataattgttaaaaaagctctgaaaagcgaatttatcatgcattatggacttacaccgctccttatgctgaataccttccaatgttgttgggtagggggggatgcagcaccaatatcaaccaaataaaaaggggctagctctgaagctaacctcattcattaaacattaaaagtaaatttataaataagtcatacttgggtttttatcgctatggtttgggtttaaacacgtgaaattgtgctttatattaataccctgcatctgcaaatattgaccaagcagagcttttaatctgtcctgcgatctattattattgttttggatattcattttatgtataccttcatttttataaattgattgagtggtaactggtcagagttgctgctcattttattttgccaataagtcagccaataaggtggtagaagctgtacttcgtactaacaatattaacgaacatacttagaatatagggttacgggcaatgtcattaagttaaggcatttacttttttacctaaaatcaacttgattagtgggcgtttatttactttgaaagtctatcctaaaacttgacaggagggattaatttgagcgaagagaatcaaaagaagctgtttggcatctcagcgattatttgcattattttattaacgattacctattttggtgatttagccatcagcaataccttaattaattatcacagctgggtagggacgttttgtcagacttttggcgagtttccggtttatcttatttttgccttatgtggacagattacgatgacttatgcctggaaaggcgactgtgaaaagctgctgggggcaggaccgttgtttgttggcgggcttgcactgtcgctttggcagagcaagaagtatgtcaatgaattcttgggctatctgtattcggtacaaactaaccttaaaaacggtaaggcgatagcaatggccaacagcgactcagtaaagggcggttatgcaggctcaatgattataatggtctggctgttgtttttcgttatatttacgctgttggtacaatggtggctgaaaaacaaaacgactaaacagctgactcgctatatgaaaattgcgattttggcgtcattgacggttgggtttgcattggaagttaatctgaccttaaaagacctgtggggacgctatcgcccatatgaactcacgatcggtaatcatgaatttaccaattggctgacgatcaatggcgttaatgggcataagtcattcccatccgggcatgcgatggcggcaacgttatgcatcgttttttcatggttcgtttccaacaataagcataagatctttttcattggtggcatcgtttatagtgtcgtgatcgctataagtcgagtaatcgtgggcgcacatttcctttcggacgttacgttctcgtttttcctgaccgtactgatcatctttatcatgaatggtcttggtaaaaagctaattgaagatttttaaaaattagggctgtgaccatcgaaaggtgaccacagcttttatttatgtgttaaaagtcatgagaatacgccacctttgataaaatttctaatcaaagatagcgtaaagcggtttcaaaaattaatagagtagagggagttttataactcgcccctctcattgcaccggacgtacggttccgtatccggcgctacgtttgtgattatttacgagataaataatattctagcggatcgaccaagcctgggcgatccgctttgcttatgcccaatacttttgggctaagcagaaagttaatgacataacccgtacttcttttataccaacctaagcgcgtattagctactttatgaatatcttcatcactaaaattgcactttagtgccttgttaatccgcattaagttaatgtatattcgttttggtagtttccattgtttaatgattaccacccgtactttatgacgcagccattgactgaacttaattagaaaatatttcatgtcgccaactctaaagtaattgacccagcctctaactacttgatttatcttagtaaagactagtgatagaggctgagcagctgcttttctgcgacagagaagttctctcatcttgtcataaagcttgattttgcggtcatctcctggctttgcttgccagtattcgccacttttccagaaggtaaagccaagaaagttgctcttggttggtcgtacaactttggttttggttgcgttgacctttaggaatagctttctttctagccatgatgaaattgaattcatcacacgtttggctgatttaccgcttttgacaaagatattgcagtcatcggcatagcggacaaagcgcaggcctctttgttccaattctttatccattttatctaaatagatattggatagaattggtgaaagagggccgccttgtggtacacctagtttattaggcttaacccaaccatcttccattactccagctttaagaaaggctcgaattaaatggagggtggttttgtcatttacttgctctctaattattgaaattaatttatcatgatttaccgtgtcaaagtatttctcaatatccaggtcaacaacccattgatagccttcgtttaaatattccaagacttgttcaatagcgtcatgagcactgcgtccaggtctaaagccatagctatgctcactaaaatgaggatcatagatcttcattaatacttgggcaatagcctgctggattactcggtcaacaaccgtgggtattcctaaaggacgtttcttaccattagctttaggaatgtagactctgcgaacagcttgcggacgatacttcatcttcatgatggcgtcctttatttctacttgatgctttttaaaatagctatcaagctcatcaactgttctcctgtctacaccaggcgctcccttattgattttgactctcctgattgcttccttgagattattttgacttaaaatctgttcaattagttccatctcgtgatatctccatttctacttgtaaatttattcagaattgtcccaattgctttcaccatcaaagagttacgttctctttgtgctaggctatcctcttatccggactgtctgaacattgcttatagcgagatatgctcttacaaacattaggcccttcgctccagtttcattacaaaaccttcagcactactacgacctcagctgacttctcgcgattaacctttttcgaccaggcttacgatcgctgatattaaagcttactcggtttcacctgtccacgagatctctcggggtaagacattcatctttaattttccactgccccctggtttaccgtcttggttttacggttgtcctttggactttaacttgtgctgcagtctcatccaccatttggcctgaccaggtttctgtacgtaggctcggaaaactcgctagccacttccttcacccatagcgtcaccgctaacggcttgtggttcgctacacttggcgacaactacccgtgatctagactttcactagactagacaaatgccatgcccgacacacagcaaaaaacactcatcaaattctgatgagtgttctaagacgttctccgttcagagtcaatgtcttaacttaatgacattgcttcttacatagtagatccttatttctttagctatttattttttagtcaattgccttagcaactgcactgtttacagcatctttttcgtcttcgattaagttaaccttgccttcgatgaccttaatgtccatcttaatttcacgactaagaagtggaacatttaccttaggttcaaagaattccttgaattccttaagtctttcaggagtatggaagacaccggtagtaactgtgataaatgtagcgaattccatgtcaccaccaacagtcttgtcaagccaatcccagtcttctctgatccagtcccaagctgcttgttgaccataatggttagcaagtaaaccacggtaccaaccacgtaaatcttgtggcttaactacgtcagcattttcaaagtcgccaacaatagccttgatagctgcaagatccttggtgctggttacagcgctgcgtaagtcaaccttgtatgatgggtcagctgttctttggtattccttaattaacttatcaactaattcagcattgccaaagttcttaacttcattgattaaaacgtatggacgaatatctgcattcattgcctctaagttgtcttcattagcagtgaaaatctcatgagctgttttaattgagtctttattttcagcgtaaagactggcacctaattcatatggacgaatttgtgcatcttcatcgctttcacctggcttaactttccagcccaaacgagcaacttgaccagcggataacttgtcataaagcttctttaagtccttttcttgagctgattcaggttcaacaaattggcgcaacttagcagcagtagcgtaaagagcattaataactacacttgacttcgagtcagcaaatttagtcaaaagtggcacaacagcagcataagaaatttgtttaccttctgctaaaagacgtaagtcttgcaataattgcaatttggcaattggatcaagttcatcaacatgagccaaaatatcatcaagcaaagtcttgtcatacttaacgataaagtgcgagttgttacctacattaattctaagtgggtgacctgcttcactacgtaaattcttgtagtaacctaagtcgatttccttatcagacataatcttaggtgccttgaagttagcattcaacggaatttgccattgtctaccaacgtctttaccttcaccaacgaagaattgttgttgtgaaagctttaagtgaccatcgctactatcaacatatgcactaactactggataacctggttgctttaaccatgagtgcataatcttgccaatatcaaggtcagttgcggttgaaagagcatcccaaagatcgtcaccagtggcattaccgaacttgtggtggtcgaagtaatacttcaagccttttcttaaggcatcgtcaccaagaagtgaacgaaccataactagcattctagaacccttagcataaacaatggcactgtcaaaggcagagtcaatatctgctggatcattgatttccatttgaattggttgaacaccgtcagtagcatctctagtcaaagctgcaggtgcttcactggtttggaacatttcccaaatatgccaatcaggttctagaccatcaactgacaagtattccatcatgttagcaaaactttcgttaagccataaattatcccaccatttcatggttactaaatcaccgaaccattggtgagccaattcgtgagtaataactgtagcaaccaatttcttcatttcaaggctagtattgtctggatcaagcaataaatatgcttcacggtaagttactaacccccagttttccatggcaccagcactgaaatctggcaaagccaattgcaatgattgtggaagtgggtatttagtttggtaaaattcttcgtaaaactcaattgcattcttagcaacatccaaagcaaagtctaattccttaggtttgtgtgctttggttgcgtaaacaccaattaaaacgccatccttggtatgggtagtctttgattgcaaatcaccaaaggcaaaggcaaccaagtaactagacatgcgaacagtttcttcaaagtggtggtagccgtccttgtccacttcaacttcaggcatattggcaagagcaacttcgccatcttcttcatcccacttaagggctaaagtaaaggtagccttagcttctggttcatcgatacatgggaatgcttgacgagcaaaagtggtttcaaattgagtaccgataatttgcttcttgacaccatcaacttcgtaatatgaaggataaatacccatcattgtatcagtaagtggtgcactgtattctacttcgataatcgccttaccgtttttgccagtttcaattttaatggcttcgtctttttccaatacatcaaaaggaacatccttgccatcaaccttaacgctatcaatggtcatgttcttttgattaatgaaaacaggattttcgattacttcaccagtaacagttgaagtaccattaatttccttttgcttacggtttacgttaatacgtaaatcataatgttctgggtggaaagtttcataaaaacgtttaactgccatatttttcctcctaattaatagatcatttacttttaattttaccaaaataagcgcgaaagcgctcaaaaaaggctatttcttgttgattgtaaggatgacgtttcagttctgtaacattgctgtcatattgagcttgtactatagaagcatagtcattaagaaataaataagttttgaaagaattaattaaatttaataaggaatgaatacatcaatgaataaacatgttaaatctactttagtaaaaatcttagctgccttagcacttgcctttgcttgtgttgcagttgcaaatgctttttctaccaatacttcaactactcaaactgttcaagctgcaagaaagctttcaaaagctgaaaaagctgctaagagatggatcgcaatgcgcgaatcaggtggtagctacactgctagaaacggtgtttgttacggcaaataccaattaaacattggctacttacatggtaacctttcacctaagaaccaagaacgtgttgctgataattacgtttacggtcgttacggttcatgggttaacgccaagagattttggttagctcacaactggtactaaaattaaattcctttaattcccaaaagctaaagaaaaccagcttagtccaattgactaaactggtttttgttttactcaaaattatcttgcttgataaaacgataaagtgcaatgactaaaactaagatcgagcacgccatccctacataggccattgttccaatgtggacagcattgttagcagcttcacgggctacttgattttccattgcatagcccacaacccatttacgcattaataccggcgtcaagacaaaactaactgtactaataattgaagtcactaacgctacattacgcgaatatggttctttaaagaactgtgctaatacgcagaatgctggagcaatcatcaatagcaagatccacataataatccagcgcccagaacttgaattcatcatctgcgcactattagtggcataacgatatgagctccaaagcgatccaccagataaggtattaagcaaactcaagaaataagatccacgttgtccataaacaccaccattattggacagaataccttgaacaagttggaaagtatcagttgatccagccgatgaaaaatcgaccgacacaacttgcttcatataagtagctaaaaacatggtaactgagccacctaattctagtgctcttaacatgcttaattttcttgaagctttcagatgaaattccagacttaaaactcgatcaggatggtgactgtgaccaatgataaaaatccctgcaatgacgatcaaggctaagataaccaatccccaccagaatttaatcatggcgaaaaataaggctaaaacaataatcgcaaccgaaatatatggtcggtcagaaaaaatattccaaaagttcaacttaacatgatggtaatttttccttgatgcatttgcgacattttgattaataatcggctgaggattactaatttttctgctgcgaaattcttcacgtgttgttgctcttgtcttagtataatcggtccgtgaacgatctgcgccggcttggccgtgctcttttttcatgcgatattcacgccgcgacatatgtgccataaactgcagcccccttctcaaagcactatagtagcacattatcacttttttgcttgaattaagaatgaaatttcaaagaaaatttagctttgttttgcatgtgctaaaatgaatattaataattgtgctttttttagaaagagataactttttgaataaaactaaatcagcaaaactgccagctggttggcatatggccttttataccttatggctcggttgctttatcactgggatgggctattcaatgacaatgccctttatttcactatttatttcagatttgggtaattattctaaactgcaaatcaatctttattcaggattagcttttgcaatgacttttattgcccaggcaatagtttcaccatattggggcagcctcgctgaccgcaaaggtagaaaactaatgtgtatgcgtgcttctggtgtgatggctttaactattaccctaactggatttgcacccaatgcaatttatattattgtaatgcgttttattcaaggttctttttctggttatattaacaacgccaccgctttaatggcaagtgaaacgccgcatgaacgtagcggctgggtcatgagtcaaatgatgacggccgggactgccggaaatttggttggaccgctattaggtggtgctctctccagcttctttggcaatatgtttggtggcgcctgggggtatcggattccattcttcattaccggtgttttaatgttcatcgtctttttaggtacaacgttcttagttcacgaagactttactccaattctcgtgaaaagatgaagccgatgggcgaaatcatgaaaagtttgcctagcgtgaaattgattgtggtgatgtttattactaccatgttggtacaatcatcaaccatgtcaattgatccaattgtttcattatacgtaaaatcaatgatgcctcatggcggggatgttgcctttgttgcaggtgttgttgcggcaacgcctggtcttggaacgctaattgcggcatcgcgaattggacacaagatggatgaagttggaccgttacgcgtattgcgaatcggcttagtcgtcggtgccgcattgtttgtaccaatggctttgactaattcgccttgggtactagcaggactgcgcttcttattagggattgctagtgcagggatgttgccagccgcacagacggtattaactttaaacacaccaagcgaaagtttcggtcgaatctttagttataaccagtcatttcaagcagttggtgccgtgttaggatcgttaatgggatcgactatttccggtttttcaaattatgcaacggtattctggctaactggatttacgttactgatcaactttgtgcttgttttgatttttgcttggggaatttcttatcggaatagataggttaagcatattcctaaagtatggaatttaaaaatgtaataaaagagctgtaaatatcacaaaaaaatatttacagctctttattattttcaattttttacgctaccatcttttcataaatgcgatacatccgattatcataagcgcacattgaaataaccagattatagcccgcgttttctttctgccacttttcaatcgcgtcaactgcgatcttagttgcatcttctgcaggatagccatacacacccgtagaaatagctgaaaaaattacgctatgcaatcccgctttctttgccaaagccagtgaattatagtagcaagaagcaagcatatgtgcatcactagtcttgccagcataaactgggcctactgtatgaattacatatttcgcaggtaaattatagccatgtgttatccttgcttcacctgttggacaaccatgcagcgccatacattcttcaagcaaacgtggaccagctgctctatggattgcaccatcaacaccgccaccaccaagtaatgaattattagccgcattaacgatagcgtcggctttcatcttagtaatatcgcctttaataatttttatatttttcataatcatgtcctcagaaatacccaacatttctttccacccccattctaacaccaacaacatcagttaggctcagaaagaatacaaagcatattgttatttttatattacgaacttgaattgatttctatctttagtatcctaatattaagtttagcgttataggagcaacgaaatgaaaattctacgacgcagtttatgcatcatttcgatcaccttattttcttttgctttgagcattctcattcctagtgttcaagctagcaaaacagttttagatgatctcatcatatttttatatttaattggaatcgtaattctgggcattctgttgttgtctaacaaatttgattacctatcactcagtctaagcataatcttgctactcgcaactatcattgcttggatcagattcccaatgattagcattatttatactttttttatcgcttatctaatcatgtgcttactaactattttcattgccaaaaggattaagaaataaatttatgttttctaaaaaagaactaaaaatcatcaatactacattaatcatcatatatctgctttcagttggcccaacattcatcttcggttttactaaatcaaatgatttcacaagtactttctttttaattgcaaatatcattttagtttgtttattcattatcattgctatcagaattgctaaaatcaatttcaggctaaagacacaatattatctactaggcttcatcactcttatttcaataatagaactagcctaccctggactgacattaaatgagcgcattagcaattattttgctatcggcaatattattctaagcttgctaactactaaaatctcaaagaaattagtttaaatataggacacaaaatgaaatatctgaaaattccaagattaattaacagtattttgattactttacgtcatactgctataaattattgaattcttattactttaaaactacatcaggtattttcaatcattcaataaaaaataagactagcactaagccagtcttattttctattaatcaactattctttgggtgagaattgccatactgttccatcttggctacggtatgagccatcactcatctttgtaaatataaagacaacttttttcgtcctaattgtgtaaccgttttttgattcagttgtatcaactcggcccaaatcagccttaacacctgtttggggtggattatttttcttagtagaatatgcttgtaaaatttctttattaagtttagtcttcttttgctcagagttgttactatttttagcaactaaaatagcatgattctttgtaaaatacagatcaaaccaattacttaagcgattttctgtgttgtctactgttaatgttcgattaacccagtttttaggtaccgttgtttgattattgtagaaaaacattccaccaataactgctacaagtactgtaactactgcaattacggataacgtcattttctttttcataatacgtttcctcttaaattcagcattaattatttggcactaagcctctcgaaataagtcttacatttcctgaatacatgctaacccatcggtttctatttgttttaaaattgtgatccatccaggtactgtttctatacaaatagccactgtaggcaccatcattataataaaccttagacggagttgtattaagtaaattcatagcatcccctttaccccaactactatatctataaacattagatacatacttgtgaagtggagcatttttgatcggtccatagactttgactcccttagtttcttgaaccgtagtttctgatgcttgaacacgttgattatttgtagccaagactgtagctgcagttacacctaaaagtgtagcagttgtcaataatacttttttcatttttatttctcctcgttttgttctaattttaataatacttttttgcgagccgaagctggtgcaggaatgttcttaacatcataactgtatagataccgtctatacagagtagtagcactttttcctactttttcacgcataacttttgaaagatatcctctatatccgttgtattcaaagtaatgagtgggaccataatcgcaacttgaacctaaagtgatccaaattctcttaggcttatagtaatctgctcttaattctgaacttacagttgattgtgtttcagttgatgcatcaactttgcttgaaaatgtaagtaaagttgtaccaactaatcctactaatgacaatgaaactagctttcttgaaattgatttcatttttatacctccgtaattatcaaatgacttatacaaattatctattctctttttctcccatcctttcaacacctggcttgacatttaatttaggtatttcaaaagtatctatactgcctaaaatgacaaaagccgttataattgtaagcgtaagtttgtttctttttcttttcatcattgaggtaatctttatgtacggtaaaaaatttaaagaaatcagaattaagcagaatatatcattagaacaagcagcaaaagatgttgtttcaatttcaactttatcacgctgggaaaatgataaattagacatcaatttttctcaactaaaccacttactcgcaaatatccatttaacattaagagaatttgctagatattgtgaaattaatccatccgatactttctcaattaaagctgcaaaagcatataattcagatgatattaatcagttgcatgcccttgctcaacaacaattagataaatactatagttccagagatagatacgatctatttttaacagcaattgctaataattattattttgacctgactcaaaaaaatattttctcgcaagaagatataaatcgattaaattatctattctctcatgttgaatattggtcagaattttacataacagtttttgcaaataccgtttttctgattaagccagaagttcaatatcaaatatgcaataaaatcttaagccagctatatttacaagatttttctagctgggatatttttattgattctattggttcaatattaaattcactaactagtttgattattagcaatcctagcctagcccaaaagctgttagaaaaaatcaataaattaccaattcctattcaatgcagctatatgaaaattagaagaaactttttagataaattacttcattatcgattaaataaagataacgaaaatgaaatcttaaacattatttcttcacttaagactcttggcctacctcagattgctcacaacttttctacactttttactcgtattaaagacttgtaatcatctccttcttatttttatgtttttataatactctcatatctatttcagcttcaatacttttgcagatttgcaaaacgaatttaaactccatacaaaaacgccttgcccgaaagcaaagcgttttttagcataagcaatttttgattaacccttatctgcacctgcagtaattccgttaacgtagaatttctgcatgaagacaaacaagatagtaattgggatagcgatgattacacacccggcaacaaattgtgcgaagtatgcagtcgcgttacctttagctgtgtgcaccatgttatacaaaccataagcaactgtataagtcttagcatttcctgaagttgaaagaataatacctgagaaaatgaagtctgtccatggagcgatgaaggcagtcaaagcagtataaacaatcattggctttgaaagtggcaaaccaatatgtaagaatacttgccacttagtagcaccgtcaatttcagcagcttcgtcgattgaccgaggaatagtatcaaagaatcctttagcaacgtagaagcccaaaccggcaccaccaacataaactagtaacaatccgaagaggtttaacatgttaagacccttcaagatgtagtacaaagcaatcattgacatgaagcctgggaacatccccaataccaatgcgatctgtaagaatggctttctaaatgcaaagcgaagtcgtgataaaacgtaagcaactgaaatagtcaaaaacgttgaaattaccattgaaagcaatgaaataactaaagtattaatgatccagttaccaaatggatattgtggattagtaaaaatcccaatatagttctgcaatgtgaatttttccggccagaaggtcgaaacgaatccagtatcattgaatgaaaaacttgctaagacgatccagacaatcggtaaaatccaaagaatcgctaaaacaattaataagatataccgaaagattaatgagagccgtctttgatttgaatatgacttcatgtctagccctccttaaatgcattagtacgacgatatgcaatcaacgaaacggttgcactaataataaagatcaagatacccaatacggcactggcgttataacgctgttcctgaccgaaggtcaagttatataaccacgttaccaacaagtcggtcgatccggcgccgttatacttactgttcatcggtgcaccacccgtcagtaagaagataacgttgaagttgttgatgttaccaataaattgttggataagtgaaggtgccattacaaatagaatttgtgggaaagtgattgaacggaaaatttgtgcggcattggcaccgtcaatcttagcagcttcaatttgatcttgtggcaagttttgaataatcgctgttgaaaccaacatagaaactggaataccgatccacatgttaacaagaataacggtaattcttgcaactaaaggtgaagcttggttatcaataaagtgaattggtgaactaatccaatgcaagttcatcaagatattgttcaaagcaccttggtagtccaagaactgcgccatcatcaaaagtgaaacgaattgtggtacagcccaaatgataacaaagattgttctccagaatcccttgtgcttgattccttttgattcaatcagaagagcgagcaaaacaccaaagaagaaagtcgtagcagtagctgccacagcccagatcaaagtccagcctaagactgggaagaaagtaccagctaagtcaccactcaaaacatttccaaatgcttggaaacctgtccacgagaaagcgattgggtgttgacgatcatagttggtaaaggccattgaaatcatgaagatcgttggcaaaatcgtaaagaacaagatacccaataatggaataaccatcaaggttgcgtgtaaccgagtatcaagcaaactcttaagttcttcaacgttagttggaatatggtccccatcacgcttcaaaatataattatgtctagttgagcgtaagttgacaatgtataggtaaaggattgctacacataagatcaaggccaatacaccgaataacaaaatcaaaactgagtttgatggttgcttggttacataaacgccttgtgcggcatcataaacaacttttttggttttaatagtacctaatgtagctaatgaatttaaagtagggataccactgaggataaaccaaacaataaagataatttctgaaagtaagagtgaaataccttttacccattgtttgtttgccaaggcgttactacccattaagaagaatgataacttggtagcaatgtcaccttttgaccaaacctcgcgatatgttgctttaggagctacatgctttttctttagaaacataacttctccccttcttaggcaaaaaggctggacaatttttatttagcccaacccttgcttatgcttttagcaaattatttcttttcaatgttcttagcgagcttagcaagttgtggcttgtattgtgctggcttaatcttgccgtcgtaagtaccactgataagtggagctgcaccattccagaatgcggccatttgtggaagcttaggttgcaatactgagttacctggcttagccatttcgattacagcttcagcaaccgggtcactcttaacagcacttgagttgacagcgctcttcaatactggaatttgaccagcgttcttatgagcaattaattgtgacttcttgttagtaatgtaagcagctaaatctgaagcagccttagcattcttggtgttagcattaactgcgaagccttcaataccaaggaatgcttccatttgtacgctcttaccaccaacttcaatcttaggatacttagcaactgcgaagttcttacccaagatcttcttgatattagcagcgttccaaggaccgtccaaaatagcttgtgcgttacccttcttcaattggttcaaagcgtttgaagtttgcattacacccttgttcttcttttgagctgcgtaccacttcaaagcattaacaccgttttgtgagttgaaagttgagcccttaaggtcttcaccattcttaccgtaaagtgtagtacctgctgagaacattactggccacattacgtaagcgttagtaaagtcggtagctacaacaccctttgaagttaaagtcttccagtccttaacgtcgttagctgataacttagacttgttgtagtaaatggtttgagcttgttgtgcgtatgggaatgcgtaaaccttgcccttccaagttacaccctttgaagcaacatcgacatagttgtcttggatatccttagttgctgatggtgaaagtgggttaatgtaaccagcttcagccatttgacctaattgatcgttaggaacttcaaagacatcagcagcctttgatgggtccttaccaacgtctgtcttagcgttagctgaaccgttaggactttgaactacacgaaccttaatattcttgttcttcttagtaaagtccttagcaatttgcttgtagtaaggaacttgttcagtatccacccaaagagtcaagttagccttcttgtttgaattactgctacttgatgatgaattacttgagccgtttgaacatgctgctaatgataatgcagcaagaacagcagtactacctaaagccattttcttccaaatcttcatgactttttcctcctaaaaaatcaaaacaataaacaattcttaacaacagtagcttctgctacatatggttgtaagcttaattaataattatctgtactgcgttttcagtaccagattagttaacaatcgccttggtggaatctttatcaaagaagtgagctttgttaacatccaagcccatcttaaccttgtcacctggcttgtgataatcacgtgaatttacaatagcagtaaattcagtaccatcaacttcttggtgaagctgaatagttgcacccaaaagttctgaaacaacaacatttgattcaattactgaatctggccaggtttccataaatgcttcttctgagtgaatgtcttctggacgaataccaaagactaagtctttgtcgttgtagcctttttcttccagcagttttgccttaccttcaggaataccaatattcaagcctttgccatcagaaattcgaccgtccttgtagtgaacattgaagaaattcatttgtggggaaccaataaatccggcaacgaacatgttaactggcttgttgtaaacttcaagtggtgagccgatttgttcaactctaccaacagacattacaacaactctatcagccaaagtcatcgcttcagtctgatcgtgggtaacataaatagttgtagtacccaagtcttggtgaagcttagcaatttcagtacgcattaccacacgcaatttagcatccaagtttgataaaggttcatccatcaagaagataggtgccgcacgaacgattgcccgtcctaatgcaacacgctgtctttgaccaccggacaaagcacctggcttcttatccaagtactcttcaaggcctaacatcttagctgcttttttaaccttttgatcaatttcatctttaggcgtgtgacgcaactttaaaccgaaggccatgttgtcataaatggtcatgtgtggatacaaagcgtagttctggaaaaccatcgcaatgtgtctatcctttggagcaacatcattcattactttatgatcgatttccaaagtacccttactgatgtcttccaaaccagcaaccattctcaatgtagttgacttaccacagccagatggaccaacgaaaacgatgaattccttatccttgatatgtaagtcaaagtcgttaacagaatatctgtcgttacctgcatattttttgtaaatatggtttaaatcaacctcaaccattgtttcccctactctctttaattatttttcattaaaaactttttcaatttcactcaatttcaactcagcagttgttggaacgatgtaatcagcttctttcaaaagctccttatcaccaattcctacggcaaattgacctgcagccttgattgcttcgaccccagctttggcatcttcaaaactgattacttcatcagcctttaaccctgcaatttcttgcgctttgatgtaaatttcaggatctggcttaccatgatgaagtgttgctggatcaacaatgccatcaaattcatccataatacctaatctagttaaaatcttaggagcattcttagaagcagaagcaattaccatctttaagttttgcttcttagcatctgccaataactcagggatcccaggcaaaatgtcctttggcgtcattgtttctacttgttcaacaaatttagcgttcttttcagctgcgaacttttctttttctgcttcagtgtatttgtcttcttgaccgccatattgcaagatcaagtttaatgaatccattcttgaaataccgcgtaagctatcgagctgagaatcagtaagtgtaatgcctaattctttagctaaattattccaagcagtcaaatgaaacttagctgaattagttaaaacaccatctaaatcaaacaataaacctttaagcattttgcgtttcaccttctttaagagtaagtttttggtctttaactacaacatctaaatcgtcacctttaagcaaggtaagttttgtttcattatgatcgacataaacttcgattaagcgaccacggtagttaatcttaaagccgtagtgatcccacttgtctggtacaaatgggttaaatttcaattgatcatgatcataacgcatccctgcaaaaccttgaacaattgctaaccatgaaccactcattgaagtgatgtgcaaaccatcaactgtatcgttgttgtagttatcaaggtcaaggcgagcagttctttcgtataattcgaccgccttcttttgcttgccaagttcagcagctaagattgagtggatacatggagaaagtgaactttcatgaacagtcattggttcgtagaagtcgtagtttctttccttttgttctttagtgtattgatcattcaagaagtagattccttgtaaaacatcggcttgcttgatgaatggtgaacgaaggatcttgtcccatgaccagtgttggttgattggacgctgatcttcaatttcgcttactggacgaaggttcttgtcaaggtagtcatcttgttgtaagaagatgccacgttccttgtcttctggtaagtaaatcttgtcaacgatgtcttgccacttcttcttttcttcatcagtaacattaaccctggcttgagcttccttagttgctaatggcaaacgctccaaagtgtacttaagtagccatcttgccatcgtactagtgaaccagttgttgttaacgttgttttcgtattcgtttggaccggttacgccatgcataacgtacttgttacgccacttggaccagtggactctagctgcccagaatcttgctgttccaaccaagacatccattccttcatccttaacgtatgaatcatcgccagtgtatgacgtatattgcttaatcgcaaatggaatatcagcattacggtgaatttcttcaaaggtgatttcccattcattgtgacattcaatcccgttgaaggtaaccattgggaacaatgcacctggtaagccttgttctttagcgttatggtatgcgcctggcaattgatcgtgacggtattgtaaaagtgcccgagtaacactaggatcagtaacacataagtacattggaacaatgtaagcttcagtatcccagtaagtagcaccaccgtatttttcaccggtaaaacctttaggaccaacgttaagacgttcatcttcaccgtaataagtcatgaataattgacaaatgttaaagcggataccttgttgagcggcatcatcaccagcaattacaacatctgatttgtcccagcgcttttgccaaacggcttcatgatcagctaagttttcttcaaaactcttagcttgaagcttggtcatcaattcagctgccttagcatcttgatcatctggtttgacgtcacgactagtaacaacaatgacatctttttcaagatcgtagctttcgccttcatttaactcaactgaaagcttttcatgaagttgggctgcttcagttgaaacatcacccttaactacttcaccattatgacgaagactttgcttaaggaggactgtaaattgtggaaccttgtatgggttagccttagtttcaaccttaatagttcttgcttcagcattttcacctaaaggcatccagaattttgcatcgtagttactgtcttcgttaacaacagttccatcaagtgctgcatcaaagtcgattttagctttaccacttaaaacggtagccttaactttaattaaagctgcttcttttaaggtaatatgtaaaaacctttcgaattcgaatttaaccttagtatccttaccttcataagtaaaacttctagtcagaagaccttggtgcatatcaagtgctaagtagaaatcactaaacttaactttagctaagtcaagtttttcaccattaatcgtaattcccatgttgatgaaacttggtgagttaggaaccttaccaaagtactttggatatccgttcttccaccaaccaacacgcgtcttatcagggaaccaaacaccagcaaggtaagtaccttgtaagctgtcacctgaatagccttcttcaaagtttcctctcatacccatgtaatcgttgccgattgcagtcatactttcttgcaatcttttatcttttggttcgaacttatgggtaacgaccttccaaggatcaatttcaaaaattcgtttcatatattctatctcccgtaatattcgaggttctctcttgtttacgctttcattatcctttagttgaaagcggtttacaatattaaatctgctgttaccgttatcaggattagttaatagaaaaagaaggtagatcttaatctgccttcttttttgcttattaaaagtaacttttaatgaacactcactacaaagccttttggtgccaattgattattctcataatcttgactaaacgtgttctcacaattgatctctactggatgatcggtcgtgttaaagtatgctttaattctttcattcccctcacgatcgacctcaattaacccattctctgttacgtgtaacttaattcgacctttaccgaaagtttcatcatgttgcaaacgaaagtcaatcaattgatgaactcgttgccaaaccgggccgtcttcttttgcccaatccattggtttacgacaatcaggatcgttgccaccagtcatacccatttcagttccataataaatgcatggactacccttttgcataaattcaaaagctaaggcttgcaaagccaaatcttggtctccattagctactgtcaaaattcgggctgtatcgtgtgaatcaagcatgttcatcatggctgcattggtagcatcccgatatttcatcaactggtctgtcaaacgactagttaattcttgtgctgacaacttgtgcttaaagaagtgatcctcaatttgcaaagtatatggataattcattacgccagtaaactcatcaccgttaagccatggacgagctgagtgccaaacttcacctacaatataaaaatctgatttaatatcagtaacgaccttgtggaatttcttccagaagtggtggtcaacttcgttagccacatctagccgccaagcatcaatatcgaagtattttacccaataagtggcaatttctaataagaaatcctgtacttctggattagctgtgttcaactttggcatatgcttttcaaaggcaaaagtatcgaacttaggactaccctcaccctttaatggatcgcggtaaggttcaactggatattcattaatgtggaaccaactagcaaaacgagaacttggaccatttttaacaacatcttgccattgcattgattgatcacccaggtggttgaaaaccgcgtccagcatgaccttcattccgcgggcatgagcttcattaacaactttcgcaaataaatccttgtcgccgaatgccggatcaacttgcaaatagtcaatcgtatcatatttatggttagaactggctttaaaaataggacagaaataaaggccattaacacccagtttcttcaagtaatctagatggtcaagcacgccttgcaggtcaccaccatagaagtcttcgcggccaggatgatcctccggattccacgctttaaccccttggggatcattagacttatcaccgtttgcaaaacgttctggaaagatttggtaccaaacagtatgcttaacccattctggcgttttcaccatatcaatttcatggcaatatggcactttgaaataagaaccatcttccataatggccttgtctacatcactgctaattgcacgatcaccgacaactacactagtgccatcactgccaattacttcaaaggtatacttcaagcgatgatatggtgcttcaagcgtaatgccccaatgatcttcacactgccctacgccaattttttccatctcacatgttttagcctgttcaagtggcaaataattatcgcagtaatgaacaattacttttttaacgtcatttttagcactgtgaaaacgcacgcgaacatgacttggatcaactacaaaactatcttcactttcagttcggtgtcttaaagctgctaattgcatatattaattctcctttttcaacacaacacctgcataaggcatcaaagttaatttttcattagttaattgatattctcccgcttttagtgttgcaacagtataaccggctggtatttcaacagttgtcttttgatcactcaatgaaacagctacaatggcactttcatcatgtaaatcacgttgataaacatagctattcttatccgttgaaatcatataatacgttccaatctggaataaggcttcttttttgagttccagcagttctttgtaaaaattaaacatgctggtggtatcgttaatctcattagctacgcaagcatcatcctgtttaatacctgttatccatggtttaacttcactaaaaccatggttctcagttgcatcccacggcattggaccacgggccggcaatttatgtgtttcactaaccatagctaaggccgcatctttgctcaaaactttttctgcatcctttaaccatggcgctacagtttgatcttcgaattgatctgcactagtgaaatgtagattctttaaccctaattcttcaccgtaataaattactggaattccgcgttgcaaatacatcaacatcgccaagctcttagcctgagtctgtgttctagctacgcgtgtagccaaacgggccatatcatgattattccaataaagagtaggctgcgatacgcctgctaatgtttgttgccaaaccacttgattttgtttaaaggccgtcaagtctaactttttaggctgatattgctttgaaaaacgctgatcacaattagaatcatcatcggtaaagtaccggaaggtaattacactatccattaggtgattacgcttagtcgtgtaatcaacagctagattgacactagcacttgcagcttcacctaataaaagcgtatctggataatcctgcttaatctgctcacagaaagtccgcatccattcctgcacctgtggtaagttagcgaaaaatggttccgcaacaattggcttgttcacgtccccatctccagttggataattttgtcgcaaatctgccttgccaatatggataaaagcgtctaaacgcaaaccatcaattccttttttcagccaatactctgccacttccaacatagcatgccgaacttcgggatttttccaattcaaatcaggcatccgtttatcaaacaagtgaaagtaagattgacctgtgcctgctggatctggctcccatacactgccaccaaagaatgaaccccagttattaggtcgcttgccatcatgaccagcgaaaatatagtagtctcgataaaggctatcggggttcttgatggcatcttggaaccaaggatgttgatcagatgtatgattcaagacaaagtccatgatgaggtggatccctgccttatgcaaatccttgattaagttttccatatcttccatggtccccatatgaggatcgattgcgaagtagtttgaaacatcatagccgttgtctacttgtggtgaaacaaacacaggattaagccagacggcgttaactcctaaatttttcaaataagggatgcgtttgcgaataccattaaggtcaccaacgccatcgccattgctatcttgaaaagacttaggataaatttgatatataattgcgtgatcgtaccaatgtgccataattaatttcctccacgcatagtttaagggaaattagaaaccgttttcaacatcatatttattgttagcggtatcaaaaaagcacaactcaaatttgaattgtgctctttgcttacttctttttaaatatcatgttccaaacattccgccacttgctgcctttctcctgcaaatcagccactggctgcgttacctcaatacagccaagatattttccttgatcattatgcaaactataaaaggcaaatgttcaccggaatcccatctttatgaatcataatcgacaatttaccacgtttgccttcgtgcatctgctttaaaactgccttaacatgaccttgactgtgaccgggatgaacttcaaagacagttttgccgatatctttttcagttcgcttaaataagcgatgtttattcatcgatgaccaaacaaccacatcgttttcatctaggacatccatttcctgaggaatagtctcaaagatagcatttaactgttcgacacttaaactgccgcctattaattcgattttatctgtcatttactttgctaaccttataacttcacgggcaatcatcaattcttcgttggttggtacaatcaatgcttttacttttgaatcaggcttagaaataaatttttcaccgtctgttcgattagccttatagtctggctctaagccaaggtagtggagtgccgacattacaccggcacgaacacctggatcatgttcaccaatacctgctgtaaatacaatgccatcaataccatccatctctgctgcatatgcaccaacataacgtacgacacgatttacgaaaatctttcttgctaatctagcatgctttttcttacttgccaacagatcacgcatatcagaggaaacacctgatacgccaagcatccctgacttatgatttaacatgtctactgcttcttctactgtcatactggtcttttgcataatatactcaagagcagatgggtcaaaatcaccactacgtgttcccattgctaccccagttaatggactaaagcccattgaagtatcaagtgatttgccgtttttaaccgctgtaactgatgcaccagaacctaaatggcaaacaatcaacttaagcgtatataagtttcttcccattagtcgagcagtacgtggagctacgtagcttactgaaataccatgtgcaccatattttctgatcccatatttctcataatacttataaggaattggataaagataattaacctgatcaagactagtatgatatgaagtatcaaacactgctacttgtggcacatccgggataatcttcataaatgccttaattcccatggcttctggcacattatgcaatggtgctaattcacccaagtcaaaaatttgttgaagctttttttcatcaattaaggcagactccctaaaaactttgcccccattaactactctatgacctacgcctgctagttcatccagactttttaatacgtgaaacttctttaaattttcaattaataagctaacagctgcttcctggtctggaatcgaagtatttttaatatattctttgccattcaacttaattttgaaaacagcattgtccattcctacacgatcagccatccctgaagcgataaccttttcgtctgggaataaaaaaagcttatatttaaatgatgaactaccaggatttattgccaaaacttttttcataatcgtgacctctattcatattttatctcttatttttagtatagcgctttcacctataatagaaaataattttaaaagcagttaaaaagcacctctgagttatcagacgtgctcgttattttttcgatttatctagttgattggcgccgaattagcttaggtttgagcattacttcaccttgaggtgaacccgattgggcaatcttttgcagtagcattttagctaacatttcacccatttcaaaaattggttgtttaattgttgttagctttggattagaaacttgatctaaaaagacaccatcaaaaccaataactccaaagtctttcggaattcgagcgccttcatcttgcaattgccgtacaacacccactgcaattcgatcactggcacagacgaaacaagtatcttttttaaattccttaaaatgttcatgaatcacatcttgcgcagcatgactatgattagaaacccgaaaaatttgtggtatcaactggtgttgttgcaaagtgttgatataaccagcttcacgtgaatattcaaatggctcttttaaatcaattccaataaagacaatgtgcttatataaccggtctaaagcatattgagtagccatcttctctgctaactgattatcagaatcaacaaagtcatagccgcggtgattttcaccaaataaaacaaaaggcttatcgagtttatcaaataattcataatctttgtttcgcgccccggtaattaaatagccatctgcatgttccttttcaatttgattaggatccgtaactaattgcatcgcatactgcttagtatttaaaccacgagcaaaaccaaaaagcaagttcatatagtatggctcagtggtatcaatatcttctaaagtgacgaattttaccacgttagtccgattattaactaaagcctgtgcaattgaattgggatggtagtttagtttctccattgctttttctaccattgctcttaattctggcgttacttgctcaggatgattaatcactcttgataccgtcatttttgatacatttgcttctttagcaacatctgataaagtagtcatattattcctattctaagtacatctttctgaatcggtttaaatctttttggctaaagccaagctcttttttgaaaaatccatcaaaactgccccagccttggcgaatagtttccgtaattccacgaatagccggtccctctcccttggtaatattcattttagaaactaggctagcaatttcattatcatcggggaactgtttagccaaagcaaagtcatacaattcattggtcaataaataatcacgcgaaatggtgtcatcatcaacacctaatgcagttaagatcagtgctgaagtcattccagttctatctttgcctgcactacaatgataaactagcgcatcttcttcaggtaattcaatcaattccgcaaaaattttagcaaattcatgttgactatgtgaattaagcaaaacctgctggtaaatttgaccaagccaattgtcacccatatcaggaatatgatggacaaagcgatataacttgttatcgcctttattttgcttgcggttttcagaataaatatgtgcatcaacaaaacggacatttgaccaaagcttgtcaggcgctgaattttgttcatacttagagcgtaaatcaacatctacggtaattcggcgttcaactaacttttcttgatcttccttcgacaaggagctaagtgaatcagaacgatatattttgttccactttacatgttgacccttgtcattttggtagccgccgatgtctctgaaattcagcggtcgatccaaagctaatattcgatcatgcttcatttttccttgcctttcctcattaaagtgttaataccgtacttttattatatcattatcagtcatgtgcaaataaccgagcagcacgaattgcacgttgccaacctgaataaagtttttcacgttcaactgcactcattttcggctcaaaggcctgtccaatcgtaaaggtatgctttaactcgtcaatatttttccaatagccaacggcaaggccagctaaaaaggctgcacccatgctggttgtttccagcgttttagcgcgttcaatttcaatccctaaaatgtcagcctgaaactgcatcaggtaattgttgttgctagcaccgccatcaacacgtaaagcaggaatttcaatgcctgaatcttgttgcatcgtatcaacaacgtcacgggtttgataagctaatgactgcaaagttgctttaattatatccttgtcagtagttccacgtgtaacaccgaagattgaaccacgagtctccgcatcccaatatggtgcgcctaacccagtgaaggcagggacaacgtaaacctcgttctctgatgtcgactcaagcgctgcttgttcagagtctggcgcatgcttaatcaacttcatcgaatcgcgtagccattgaattgcactaccagccacaaagattgatccttctaaagcataagtaatcttaccattaatgccataaccaatggtcgttaacagattattgttagagtctgttggcttgtcccctgtgttcatcacaataaaggcaccggtgccatatgtatttttcaccattcctggtttcaaagctagttgaccaaataaggctgcctgttggtcaccggccatcccagcaattggcacttgtccaccaaagaacatatatgacgctgtttcaccataaatctctgaattcgagcgcacctcaggcaacattttcttaggaatattgagcaaatgcaaaatatcgtcatcccacttgagcgtgtgaatattaaacagcatggtccgtgaagcattagtgtaatcagtcacgtgtttagcaccatcagttaacttccaaactagccaactatcaatcgtgccaaaaagcaactttccctgttcagctttttcttgcgcgccaggtacatgatcaagaatccagcgaatcttagttgcactgaagtatgggtcaataattaagcctgttttttgacgaatttcatcactgtagccttctttttttaatttttcagctaattctgttgtctgccgtgactgccaaacgattgcatgataaattggctcacctgtatccttgtcccaaacaacggtcgtttcacgttggttggtaatgccaattgcggcaatttgattaggccaaatgcccgaattaataaaagcattggcaattgttgtttggaccgccatccagattttattagcgtcatgttcaacccagccaggctctgggaaatattggtgaaattctttttgggcagaagcaacttcacgtccatcatggtcaaaaataattgctctagtagaggtggttccttcatcgattgctaaaatatatttttctgtcatagttattctcttttctgcaaaagcgctttcttataatattactgtttttctaatgcagattctagcagttaatgtaatagatacggtataatttttataaggattttttaaggagggcattttaatggaaaaaaatcaaaaaattgcggtaacaattgcgggtaacgatagtgatggtagtgcaggaatgccagcagatttgcattcattctatgcacggggcgtttatggcatggggctgatgaccgcggctgtagctggtaatacaaaaggaatttttgcccaacaaattatgccgcttgattttatccaaaagcaattcgatgtgttaaacgacgacttcaagattaatgcgactaagacagggatgctggctaacaaggaaattatcgattgcgttgccgataatcttgaaaaatacgacatgggtaaaatcgtgcttgatcccgtcatcatcactaagcacggtgccaccctacttgatgatgatgcctaccagaccttcttagacagattattgccgctagccgatgtaattacgcctaacttttatgaacaacaaaagctaactggcttgaagctaaataataaggaagaaattcacgcaggcgctaaaaaactacaagagatgggtgctaaaaatgtcttgatgaagggacgtcatgactcagataatcagactgaagtaactgatattttgttgactgaagatggcgcatttcacgaatttaccaagcctttctttaagactgatcgcgtgaatggcacaggtgatactctctccgcagttattgcggcagaattagctaagggaaagtctgtaattgatgctataaaaattggtaaggactttacttacgctgcaatttctcacccaattgatgttggttcaaaatggggtccgatcaatcacttggctgcacaggaagaaaatagatagaaaaaacaccgaagctcagattttgagcttcggtgtttttatgtctgttttcaattaaatcattgctgtgtagagatacagtattacacaaataatgaacgctattacgtatcccatgattatgctaataactcaatgaatatgatgatgttgcatccaagtagctaaccagtcgcccaggactagacaatatgatcctactaaccagtaattgatctttttctgattaattgctggtaatggcaagattaagattattattagcgctacagctaaaatatatttcaaggctgtatagagtttaggacttagtaatgattcacgcaatttattttaccttgtttcttctaaatcatatattcgatttccattaatttttggatttacttatttcttatagctcttaatgatccaaaatataccaagcataataaaaaggatcgataatactactagttgcataactggtttatatctaagaacgcatgaatctattagaaataccacaccaacagcaataattgtcattccagatattttgctttccttttttataataattattacaacagcaattaagattactactgcagttacaattgaagcaacgtcgacttgcattaacttaagtttttccttccatctaagtcttcaactattattttaaatcatgtaagttctcctgcgattgactttgtatcatatttgttacaaattattactcagaccaactagcaataaagtttttatagcctaatacaccaagatcctgtctaatctcttttgttttgtccttttgatccaaaaataatgctttcatataaaacacttcaattctataaatcatcaaatgaaacgacccagtagcattaataatatattccatcacatcatcaatatgatcaaaatgtgtcagttgtttatgaacctttctgtcgtaacaaaccaccagataattttctagcaatcttaaatatctttcagtcgttaactctgaaagctcagatttgtttgcaaaatcaagcaagcgcccaattaaaaagtccaattcatcttgtggccacatcggcatcgtattaaccagtaatctcaacaggtctggtcgctcaagccaattatttccttcatcaaactcagcttttattttcttcctgatttctacatcaatcttgtcagtcttccccttaaaatatgtcaaagtaattagtgctcgcaactttagaatctcattattagatgaattcattatctgctgacaatacttatccaaagcttcagtatctttcgcactaactgcttgattcattttagtttcaaattgcttctcaacttttcgttcttctaacgtgtagtcatcttgaataagatcacaaaattctactaaatcaatttgatgctcaagcaatatttgaaataagctttctgcatttatgcgatttttatcgctttcaacttttgcataaaacggtcgactaagaatcccttcgcacatctgctcttgtgttaaccccaacttcaatctttttttacgcagtgcttctccaattttcatagcaagcctcctgtacaatttttaataaaaatagcactttatactttttagtcaatgaaaaaagccgccccgagggacggctttgtagtggcgtagcatgctacgaatcaacgtaggagttggtcaagcatatgctttaatcgcttcttaagagctttcttaaagcgcttgatgcttccgcggtcaattggtataactactagtacgagaaagatacaccacttcacggagaatacacctccttctgcacgtaaagtaaaggcgctaccctttgtgacgtgcattttaattttatcatgatataatacagttagtacgagaaagtatgcacgtgatgtgcgtgggctactagctggtagctcaaaaattagcagggcggtcgaatgaccgtcttttttgtgcaaaaaaacagcaacgaaattaatcattgctgctaatttacttacttctttttctcaatcacaaaataatatcctgctgtcaaaatttgagcaattccttcaagcgtaattgccaaatctgcaccaaaacgcgctacaatcagcccgcctaaaaacgagccaattggaagcattgatgacagaatagagtcattaattgtttctacttgacctaaacatacctatcttttttagtatatggttctatctataaatataactaccatcgggataaaacgttattgctcgcttatccttgtaggactcaattaatgcattgattgaatttttatctttgaatcccattctttttgctaaataattttgcgtcctgcctgtatccttacaaagggaatttaatgttctctttagatacttaaaatcatacttcttatttaaagaatacattaaatctaaaagagatattattacaattgctaatctgtgaggataattaccattatccatattcaaatatttgcgatattttgtagcgactttaggcatggtcttcaacgaaatatctaccaaatctccattatgacaacatatatttctaattaaatttagcaattctaaactttgaattagacttttaatatctaaatggaataatttctgactaatttctttacggttatcaggtagcatcaacttggctaaatatatactttgcccgaatgataaagtatttaccataagccaaactgtgggaaatattcttgtacggtccgttcgttcaaatttttgaacatctatatagttagactttttcacttgatgctgcaattgtgataaaaaagccagttcttcattttttatcttatacttatctatttttacgcccataattcttccacgacgtttaacagtacctaaatatttatttcttccactattttgacaccacttttcaaagtccaaatataaatatgggtctgtcttacctaaaatataagagatttcattgttcaatgcagtttctatatcaccaattgcttgaaaaatttcttgctttaaacgttgatctctatagtatcttttaaccaattcatcaaagctaatacccatatactgattattatcatgatcccaaaatgcataagaatactgtttcaatttataatatcctattatttttaacgtattaacctgcttttcgaatttaatgctattttgatcaattccagtgattccttttttcttaaaaagaaggacttggtctacatatgaaagatgatgctccatgattttctccataaaaaaaccttcgctgatggataaatccgtcatcacgaaggtatgatctatcattattatacaagatttcccaaaaaaatgtagtatttagctagtatttttatcgaacgtatgattaattatatagttatttacatttcaaagcaaacagtagataaagtaagtaagtgtcaatgtttttgcggtagcctttaaaccattagtctaaccttaatttcttaaatatttatatgacttaaatttctgcttagcttgcttaaataactattgccagctacctgtgcggttaatgcgccatgctggatgcctaaatgaacttcatgacgcttctttaagctgtcacgggccgctgcttttaattcctgttcagtcaatacagttatttctgaatcttcaaactcgctgctaagccaaaattccagctctcgattcttgatgcagcttaagatcctaagcatgccttctgctccagattttgaccatttcttgccttgccccttacacggtaggtatacttgcggtggttgctctcgcagcagccaatggctttagtcacagtcagttttcgtttcttaaacggcttaatatcgtcccaatgacgatcaatataattccttaggcgccccagataatcatgattgagctcggtattcaattcatcaattagtcggctttctgcagtggttaggatagttttaactttgtcatagctgtatttgtattccaaagcagaaatcagcttgccttgcaggtcaggcgcaaaatatagcctttctttgattttcttatttaggtgaaagacatccaagaaatgctcatgacgcttgcatagccctacaatgtcatcgaagtctgttttggcatatccagcaccgccatcggcgttgctaagaattacagtatcagaaagatcataagtattggccaggtactccttggcttcgttcagcgcatcaagtcggcttaaagaaacaaattccttggcattgattcgctttctgcgtttcttgcttatattgacaatgccttcacagacctgatagcgatgaaattccaaccggcttttagtgcctttgatcaccacgccatcgccttcaagatacaaaactgggacctttttcttagtgcctgcggcatcatatcttgaatctgcttcttggcccgctttaatatttttcccggccatttttaccaaattgcccacctgcatatggctaatattaaagccagacaggcaattgactgctagagcagtattgcgataagtggcaacgctgcttacttctaagatgtttttgactgctaaaatactgtagcgcttgtatttgtcaaagcccattaattcatccaagggataccttgcttgtttgcctgggcagacatatcttcttctgacatacctaacttcgccaaaagccatattgattgagcgctcattcttcttatcaatctgatagccctgtgctttaaccttggtaatcatttcatcatcaactttagctaaagccaaggccatgatttccttaatcaggtttaagaagaaacagattatttttctttcacgcttaatataattatcttcagactttataatatttgcgatttcagttacaattgaattcataaaagaccagcttctaatgtgttttttgttcttaacatcagactactggtctttttgtttgagctcaagtccaaattcaaaggacttgggcttttttaattatttattcaacttaccgtaaaaaattatacacttagataaagtaagaaaaaaacagttacatgccataatgtaaacttagagatttttagcaatctacatctatgcataatttttgcatgaaaacagcaatgatgagtgtattttaatttacttctttttcccaattacaaaataatatcctgctgtcaaaatctgcgcaattccttcaagtgcaatcgcccaatccgcaccaaaatgcgctacaatcagtccacctaaaaatgaaccaatcggaatcattgacgataaaatcgactcattaatcgtttctactctacctaaaatatgcggactaaaactctcctgcaccaacacttcaaagttaatattcatcatcacaatccatagttcagacgtaaaaaacaaaatcaacagtagaaacggcatccctttgggaacagctggctcaagaacaattgctaaacctgataacgtgagacaaatgacgactagccttttaatcttgcttttatcaaaagttagtcgctgtaccagtacactgccaactaacccacctattgaagaagctaattctaaaccgccatagctaatcgctgatttagtcaaatgctcagtcgcaaaatatggcaagcccacagaggaaataccataaaatagattagtcactgcaaaaggcatgatcaagcgtgctattttgccttcttgtttcagagtttgccagcctttaagcaaatcttgccaatagttttctgtgaaatattcattcgacttattcgaaagtaataatttcctagacaatattagtcgcgtataaaaagctagggcgcttgcaaaaaatactgcagaaataattatcgtggaatcaagtgacacccaagtaatcaataacgttgccgctgcattcaaaaacaaatccagcgttttataagtcatttggaaaacgccgtttactttagttagctttgcttttgaaataatgactggcaaaattttttcttcagcaggataaatcaaagttgagccaatcgttgaaatgacgtatatccctagcaaaagccaaattgttaaatcttgccacagtttaatttgaaacaacaacgccgctataacgctgtccactatctgcactagcgttacaagcttaagtagctttttaatatagacacgatcaatcaacggtccgaagacgaacgacaacatttcaattgatgagtctgcaacaaagattaacgataagataagcggcgaatgaaagcgcaccttgaaaaaccacaagatcgccatgtaaaacaacgaatccgcaatgttggttaacactcgtcctgctaataatcgtctgacattgacattttctttttcaattaagttaaacattttcccattccttttcacaacactactaatgtcgctgaaagccagggaaaattactatttagttttagtttaaaatcccagactttcagctaaaaatctgggttgagccttaagtagcgtttgacgaatgaaaggaaataattcattcgcaaacttaaccctaaaatgtcgcgcattttagtcctcgctttctgtgaaaattaagatcattatagcatgaacagtggcttatcaataatagtcattctatccttatatttttcgtattttcattcaatttcagatcatgacttatgataataaccaaattaacttgcgctatttcctgcaatagttttaataaatcactttgtaactcaggatagatatttgccaacggttcatctagtaaaaaacattgcgcgccagtttttaaaacagcagaatataactttactaactgtatttcacctgttgatagttcgctcatctctctatctaaaatcttttcaattctaaattgtggcgaatcaaaaacttttgcaaaatactcgcttttataaacctgacttttatcagaatatgatcctaaatagtccctcactgaacaattagggagtggtatatcttgaaataaacaacttatgttcgattctctcagttttcttttattaattaaatcagcatctataccatttatggttatttttccttcctttttcggcgtgtataggccaattattgtcctaagcaaagtagattttccaattccatttctgcccctcacaatataaaatcctggagtaacaaaattggcagaaaaattttgggtaaataacggtgttttttcatctaagtaaatattaaaatcatgtacttgaatcaagtttattttagagattatttttctaccatcttgttcattcttcatggttagtatattgttgattctcatccacgctactttaaatgattcaaatttaaataaaatagaaaaaatttcatcaacctgtcccaaaagttgattaaaatattgaaaaataattgaaaaggaaccgattgtcatcttaccggaaatcactgataaaccgccattaataaacaatactaattgaaaaataagttgtaaaacaatctcgctattagacatatttaaattgagaagaaaatctctcttagcaacgcctaaaagcgttcttttagtattgctccatctctcagtttctattttctctcttcggttaccttttacttcaatatacctgcttaaccattcagtaaaaccagaaaagtacttattataagcttctttcaattttaaactaacttcaaaaatcttaggccgtaaaaataaatatatgagactatatgcaggcaacaggatcgctattaacaataaaaaaccagacccagccataaataaatatgtaaaaatcaaaattgaagaaagggcgattgaaataatttgatttattgtttggaataaaaaagtcaacacttcagtagtatcttcagtaattctatctgctgtttgaaccgaattcatctttgtaactgctagcgtatccttcacatacagttctttcattattacatcattaacttccatgtttatttctctaaatcttaaaatctgaattttgttcataaaatatgacaacaaaagtctgataagacttaaagtcgttattaatacaatactacgtacaaaagcagccctatcagccttatatactaaggaatttaacagtattccttctaagtaaacattaaaagtcaaaatgccagtactgataatattcattcctaatagaagccaatattcaattttatactttttatcaattttgctaaaaatcgtatgcatagtgtcacctaactctgactagcagtcaaaaatgttaaaatataatgaatataaaattagataaattttatattcttatttatcctatgtcaatactaaataaattgatttggttttactttcatgctgtatttgatattatgtagttactaactaccaaataactatctatcaactacagaaagagaaaaatatgactgaaaaagcagcaattaacatccgtgttaataaagaaactaagcaaaacgcagagaaagtattaaacaaactaggcatcccgatgtcagtcgcaattgatatgtacttacgacaaattgcattgactgacggcattccctttgatctatcttccaagaaaagaaaaaagaaaaatgatcacgaaacagcaatgatggtcgcagaagctacagctcaatatgaaatcgttaaatccaactgggaggataaattagctgagtttattcctgactggatgaacatgaataagatgactaaagaggagcttgaagcaaggttagctaagcatgcccaagatgcaagagatggtaaaagtgtcgagattagcaaaacttttagcgacctgaataaagaattaggaatttaaatttcatacaagaatatactgtcaaatcaagtcctaacgtatctgtagaacttaaagagatatatagctctatcttgcaattatctcgatctccaaaaactgctcgagattatgtaaaagatcttgaacaaactatgcaagcgttaaattattttccagaaagatatagaaaaactccttcaggaaaataccgacgagttaatttcaaaaaatacgctatattctactttatcgaaaacgatactgtacacattattgatgtcatactagcttcatcaagtacagtattcaaatattaatcctttgccccattctagctattaagctatactagacagaagaaattaaacgaactaagggacaataaaatgagcgataaattaattaaaattgcatacctctacgaagatttaatgaatacttacggtgactcaggcgatgttaaaatcttgagctttttgctaaagcgtgaaggctacgacactcaagtcgacaatatttcacttggcgatgacttcaatgcctttgactatgatttcgtcttcttcggcggtggtcaagactttgaacaaaccgttgtagccaaggatttaccacggcacaaagaaacacttgataaatacatcaacgatgacaaacctatgctctgcatttgtggtggttaccaactaatgggtagttactataagaccaactcaggtgtaacaattcctggcttagacattttgccacttcacactgtcttcaagagcgacaagcgaatgattggtgatacccgttacatgaccaaatggggcgaagttaaggcttttgaaaaccactctggtcaaacttacttcgacaacaaggacaagttgcatcccctcggcgacatgatcgaaggctacggcaacaacccacaagaccacgtcgaaggcctgcgctatcgcaactttattggttcatactcacatggtccactacttaaaaatactaatgtagctaatgccatcatgaaaatgattatcgcttggcaccaagaacgtgttagcgaagccgaaaaagtcacagaataaaaaagacccagtcagaatttctgactgggatttttcattatcaaattaatttaaaacacgtttagcagctgagggataaaagtaggcactgatagcctgctttctcaccccttgactaggagttgcagcgtgaacatattgtccatcaccaacataaataccaacatggtaaggagctgaggcagaaccccagaacaacaagtcgcctttcttaagatgacttaacgaaacctttttacccttagtaacttgaccataagtagttcttggtaaggtctttttagcggcttttttataaacgtattgagctaagccagagcagtcaaaggctgaaggaccggtagcaccgtaaacgtaacttttgccaacttgttctttagcaagttggactacggcgttacgtttttctgttttgctttgactagctgcttggacagtttgcgtttgaagtggaacattaatgaatgaaattcctgtaaaaaatactgacaaaactgtggcaaacttaactaaactacgtttaaaactcaatttatttctccttaacacttcttatctttcaacgttttctatattaccgaagaaatattacagccttgttttaaaatgactactataaaattaagcaatgtaacaaaatctgctatttcttgtaaattttgcttaacttgaaaaacactataattttctatatgcttaatacattaatttaggagttttttattatggataagatagatagttatgtacgccactttttaatattaatcgcgctaattttaggactctcgctcgtctcagaactgcgcgaaattattgcctatgactcatctaccattggcattatctctttaaccactgccattatctgcacttttgcttcgggcattaccttgcaatttcacaagcttaattggcttacgatcagtttaatcttaattctttctgcaatcgtaattctattctggttcaaaacctatacttttggtctcgttgtcagcatttttctgatttataacatcattgtatttttggtttgtgttactaatataatttttcaaaagaaggttgaatagttaacttctatgtcagtcgttgatctctataaaaactcagcttaaattgcctatctttatgaaaagcataaattaggaaggaataattatgactagcatcattgtgtttatcgctgttacaattatggcgatattcacaggaattatatttatacgcgtggtgctagttaaatcgttttagttaataaaaaagtccaattagactagactcaagttgtaagtaatttaaatagaaaagagtctgatctaattgaactatctcaagcttaatcgtttttctcaccatttacaagttagttttaatcggttaaatgtgatttgtcgctcgctgtataagctttatgcgcctgatggacttaaacatcgtaaaaatgttgatcagaccaagcttcctgatagttctatcttagcgatgctcatttggcaaactgaaattggaattgaatctcaacgaagattctgtaaattcttcgttggcttatctcattctcgttttaaccgtcgagctcgaatgctcttgcctctaattcgttgtatccgtcagggttggaatcaggaagtaaaggtaggtggagaattattgattatcgacagttttccgattccagtttgtcagcctgttcgcaattatcacgttaagatcttccgtggcatagccgatattggttataaagcgacgaaaaaaatctactattatggcttcaaagtccacgcaatagtgagtgatgatggctatctgcttgactacgcagttactaaggcgtcggtacatgatgcaaaagagacggtagaattgatgatcaatgctcatccaattaaccattatcttttaggagatgaaggctatttaggaaaagacttagcagccaagctaaagcgtatgggatacgtgctttggacaccatatcgtaaaaacatgaggggtgctaaaaagcataatgatcatcagttaatggcaattagaagaacaatcgaaagcgacttttctttgcttagctattacaatgctgagaataatcgagccaggagcttagtaggttttcaacaacggctagaaatagctattttagcttataatatggcatattgtctagaacgatttaactagcaccacgcgtatatttataaaattatcaatgcgcatgtaacctataaaaagcattatccttatcgtaaattagtaagggtcactttaatcagtctcccatggatattttgggtcttcccgtttactctagattggagtacctatatcactttagtaatagtcagaattccatatacaatcatctggagtttgttaactgcggtaggattgtatattgatattaagatgcaaaataaatatcgacatcacaggaacaacaatggacactaaaattttaacagcaatcatcttaattatcgtagtaattgtactagcctactcaccattttataaaaggtatcaactattttacttgaataaagtaggctattgggatatcctaatccaattcctagtaattgcaggtatcaacttattcattggattaaaatacggtctaggtgccctgtttctattgattgttcccgttccactagacattattttcttaatctcaatgatttattcttactttaaaattagaaaattgaaacgcaaataactcaacaaaacggagccaactaaagcttcgttttttgattaatcttatttttcttctgtttcggcgttagattcaaagccatcgcagccacgacaaccaacactgatccgacccaatccattggcatcattactaagttaaagaatattacagaacctatcgttgcagaaaatggctcaaaagcatctaataaacttacagttgatgggattacataccgcagcgcgtttgccataatttgaaacggaataatcgtcccaattacaataactgccgcagtatacagccaaacttcaggcttattcggaactgcatgaaattgcggatcaattatcaacaaactgattccagcaaaaatcatcccccaacctgttacaaccatactagaaacttttttaacaatgttaactggaatcaaagtataagcagcctcaccaaaagcggataaaatgccccaaaatagtgcaactggcgtaatggccaaatgattaaattgcccatgcgttgacaataaaaacactcctaaaaaagcacataacgccgctatgatatccaatctacgcataacttgcttgtgcgtgatagctaaatatcccaatacaaaaaatggcccaataaattgcaagattgtcgcaatagaagcattagccacttgaatacacataaaataaaatagctgcactggcaataatccaaatatgccataggctataataaccaaaacattgtgcttatttttcaacgtagctattggtttttgctttaaaaatcctgaggcaattaataaaactgctcctgaaataatcaacctgacttgggttaaccacattggtgttaatttaggactaatatcaaacaatcctttagcgaataatcctgacacaccccacattacagctgccattgccgctagaaatgtccacaatcttcgtgtttttgctggtaccatctagttcacctttttctttctcattcacctaataattaaaccacaaaaataaggatacctactgggcatcctcaactttattgatgagtttttttaactttctttttcttaggtgaaatattcaaggccatagctgccagcacaactaaaatcgaaccaatccagtccattggggtcatcaccaaaccaaagcaaataactgaaccaacggttgcagaaaaaggctcaaaagcatctagcaaacttgccgttgatgccttgataaagcgcagcgaattagtcattaattggaatggaatcagggttccaatcacaatcactgccaccacatctagccatacatgtggcgtattcggaatatgcggcatctgtgggtgcacaatcattaggcaaattcccgctgacagcaatccccaacctgtaacgactaaactagaaactcgcttcaacacactgattggaattaatgtattggtcgcaactccaacagctgaaagcaaaccccagaatagaacgctaggcgttaaagcaaagtgattaaaacgcccatgtgtcgccagcaatactacgccaataaaggcacagatggcagcaagcacatctattcgccgcattacttgcttatgcgttacagctaggtagcccattacaaaaaagggaccaacaaattgtaaaatcgtggcaatcgaagcattagcttgttgtactacaataaagtaaaacaattggactggtaataaaccaaaaatcccatatgcgataatcgtccacgcgtcatgcttatttttcattgtagcgattggcttttgctttaatacgccagctacaattaacaaaataatgcctgaagttaccattctaatctgtgatagccacattggtgtaatctcaggactagtattaaataaactcttagcaaatagacctgatattccccacattatgcaagctaatccagctaaaaaggcccacaggcgccgttgtttttgtgtaaccattctttttaatccccaacttttctaaaactaacatactctatcataacaaaaacgggctagcttgaactagtccgttaattttttattcatcatttttcttaattgggtttctgctaggcattagctgcatgaatgtagcaacaataattaaaaagccaccaaacatgtccattgggccaaagtccgcatgaagcagtgaaactgacaggatcgttgcaatcagtggctcgaaggctccaagcatccctaccgtacttggttcaatatactgcacactagataagtacattgtataagctaacaatgttccaccaataataatataaacaattacccaaacatcaactggtgcaagttttggcattggttgagtgaagtaaattggtaaaaaggcaatgcctgcaaccaacattgctgcgccgattactggaatcggcccatactttttgaataatttcccaggtaatactgtattaatcgcttcagaaaaagccgcaattaagccccagaaacaagcaagcggtgataaagcaagttgatcgaatctgccacctgtagccaagatgaaggttcatacaactgctaccacaattgaaatcgcatcaattcttcgtggccacatcttacttctcaatgaagaatatataattatgaaaactggcgctaaaaattaaatcaccgtcgctgtcggagcattgctgtacttgactgctacaaagtacgataattgtgagctccccattcctaagaaagtaaaaatgatcaacataatgattacttttttatcatgtagcattgccttgacttggtccaagtatttccaacaagcataaatcataagcagggcgcctgaaaaaagcaaacgcagacctacaagccaagcagtatttacattagtgctagaaaataaaaattcaaccgccgtacccgatgcaccccaaaaacaggcaccgacaacagctaaagtcaatcctttataacgctaattcacattcacacatcctttagattaatgtttttcattgtaacatgggctaaaggaaaagttcaatgcttctaaagttgatttaatctatataacgtataacctgacacgctagccaataagccgattgtaaaaagcaaccaagattctggatgaaaggcaattaaaacaagtgaaagaaagcctgctgctaaactagaattgcgttccattcgctttttgccaaaaagcagaccacacataatgccaaacatagttagcacataaaatgagtcaactaacagtaacaaattctcaataattgctagatcacttggctttacttttacactcaaatcagtaaaaatctgagcacagccaaaaaataccatcacaaatgcagctaagatcgtgataaagctaatcgtacgaaaaactgacttcaccttttgagttggcgtttcatcgataaaggtttttaagaaaaactcgtgatctttttttgctactacagctctgcccatcttcttgtcataccagttcaatagaccagaaccaattagcataatagcaatcacagcaaactggatgacaattaaacgcatgaaaattggaaaggcatagattaccgtcaataacaaaattactacatagatcagctatgcataaagaaagaaatgcagacgctgtttatttttgaaaatagtttggaatgtttttgaattaggatcttgcataagacttctccccactaaatcttattacgaaaactcaaccagaaatttgccccactgagaatcaagccaataacagaagctacttgcatgcttggctgcatgaaaagcaagatcagtgataaaacaacagttaaaacgctagacgcacgaattaatttacgatttccacctaaaataccgacctccacacaaaagagtagaacaacatataggccatcaccaatcagccaaacattttcaaagagattggcaaaattaccggtaagcggcttagccaaaatgtcagtccaaagctgacgtgcaaaagcaatacttaaaccgatatttgcccaaaagagcaagaattcaaataagtgaagaaatacgtttttagtaaatctaatactagtcagtgtttcccagaatgtatcgtgttttttaatcactatccttcgatcaagaaaggcaccaattgaatagtaaatcagaattgcaatcccttgaaatgcaatcaaatgcataaaaactttaaagtcaaacatcaatgtgaatagtaaaactactacataagctaactcaaaatataatacacagcgactaaactttcgctcgctaagccagtgcttcaattctcttttattcatatgatcactaatattgccattcatattctcaccatcttttaataattatctaattatgcaaaaattgtataatgatttcaaaattttgtctagtccttttataattgatttagtaaatatttttcgaggtaaattatgaattatcccattttaattgctattttgatcttcttgctgtgctttggccgattcatttggatcattactcacgaacgtcgttccttacgcgctggagttagcttagttatcaccttatttagtttttttttttaggtgtagtcattctggttaatatcgctgaccttgatccacattacaaagactggattttgccattatttgtgattgcgctatttgctgtgatggctggaacgattatctttgcattaactttgatcattatgtttttctacgatggcattaaaatcattatcaaagaaggaaaccgctggacaaattatctttctctgggcatggggatttccattatcttcttcctatttttatatcctcttgtgggacgaattagtcatgatagctggttaaagtatccctatatttttctatggctagtcatcatctacttagtcactatcatgatgatgtatactttaacttcttggattaatttaattaattggcacatgccgcacttagactacatcgtagtgttaggcgctggcattatgggaacaaaggtaacaccacttctggcagctagaatttcccggggaatagaaatttatcacaaaaatcctggctctaagttaatcatgtctggtggccaaggacctggtgaagacattcctgaagcagctgctatggctgaatatgctgaaaaactgggtattaataaaaacgatattattatcgaaaataaatccaaaactacccagcagaacttgcaattctcacatgcactgatgaaaccaaatagtcgcttctgtattgtaaccagctcctaccacgtgtatcgcgctctggttttagctaaacgtcaaggactcaagtgtactggttatggtgccaaaactaagtggtattttactttaaatgcttttgtgcgtgaattcattgcatatctggtaattactaagaaaatgcaattgactatcatcggttttctagcagctatcatgattgctgctgtcgcatttcatttttaatttattgcgttaagttgagaaacttagcgttttttattgatttatcttttaatttttttataattatagtcaaatctatagaaagcaaggtgtaactatgaggattcgtaaaaacaacttgtcaaactgtcattagtcaggatgacgagtcctgactttttcaaaaaagtaggttacttatgtcagaaacaaaattcaataaaactcttcttagtgtcagtcatgtggatttttcctaccctaagcgcaatttattcaccgatctaaatttttctattgctaatggtgaacgtgttgctctagttgggcctaatggaattggtaaatctacactaattgacctaattcgtaagcaaatccaaccagatgatggacagattatttgtcacggtgaaattaattatgtacctcaagtcaatgatcaaactgtaattaatgactcaaagagcgctggtgaaaagcgattagctttaattgaaaatactatttggcttcctggttctcttctcttattggacgagccaacagtttacttagatgacacaaatatccagaatttactctacttactcaagaattatgatggagcaattctagtagctagccatgatctggattttatcaaccaactatgtgagagaactattattctgcagccaaataatgcagtttattacccaggaaattacgcacagtatctcgaacaaaaacaattagataaacaagccgtacacaattttaacgaaaagcgagatatattaaagcaacaaattactgaaaaagtctctactttaaagcaaaaaagtactgactataatcattttgctaaaacacaagacaatactggtcgctatccttcacggagccatgatcatgtccaaaaaggattaaatagtcggcttaagcgagctgaacgtgaactggctgagcttccagagaaacagcatctatatcaacatcaacttaaacttcctgaatttaaaaagtggccgactaaaatacataattactctatcaaaatagatcaattactcagtccccaaaataagactttattatctaatacacagttaaacttgcaaacagccgatattattggattaatcggccccaacggctgcggtaaaacaacattgctcaaatatttagaacactacattaatcagcagcaatctttgccaccagccagctacattggtttaaatacgactaaacaaaagaaacctgccacagtagcagatttctttcacgagactattttgagcaaaactgaagttaagcgtcttttagttaaaatggatatgtttgtcgatttgactacaagactcacggatttgagtggtggcgaatttgctaaattagcattaatcaagcagctataccttgaacaagaatctattctattacttgatgagccgactaactatcttgatccagaaagtgtgacggccttggcccaaatgctaaaacagtcgcatctcacttgtattattgcatcccacaattgcaaatttttaacccaattttgccaacaaatctataaaattaagcagcaaagactaattgaattgcactaaagcatttctcttaaacacatatttgctaagcatatcctttactatccccatctatattaatgaagatcacatttggtgctgcagaagtttggtgcgtttctttattatatttaccaccataatactcataacgaggtttccccttgccaaaaggatctattcggcaaagaaagatcacatatgtcgctttgaattctttttccggagagccacctagcccgccatagattatttcttcctgataagcgttggcaacttccagaatgttttctcctggttcttgcgaccctacttgaattattaacccgtatttattgcgcttcttgtctcgcgcaattacatgtacgattgctttttcatctaagacatttctatttggatcatcaagtgattttgcttcctgaatatcgagttcgggaagcattctttgtactgctggaagaagctgctcattatacttcttcataattcctgcagccaagtgatccaccattgccggtgacatttcattttctaacataaaaaaatcctcatttctaaaaatctgagagttttatccctctattacttattacgcaaaaaaacgcaaaaattttttcagaaaatgaagatttttcaattttttagttttcttttctaaaaaatggactgagtagcgatacaagcaggccgtaaataaaataccagcgataaatatctgccaagtcttgattttgaatccacaaaattattgcaattactgtcagtaagccacctaaaaagattgttgaacccatatttttatcagtaaagaagctgatagcagcacctaaggtaattaacgctaccaaactataaatgacgataatcactggtcctttagtctgaacgttaacatcaagcattggtgcgttagtaaacagctgccacacgataaaaccagctaatgcaatgccacatagcaatactagtaatctaaaaacaaaagttaaagtctttttcattatttttctcctgtatgcataataatactagtataacagcaatatcgcggcatacgaaaagcgcttggatttttccaaacgcttttttactattcttttgcttgcataaattgttttctagtgatgtatttgattgatttaacgtattgccccttgtgttgaattgaaatatattggcctgatggatcgtagccgccaacctttttcaacaataaattctttttcgtcttaggattatacgccttcacattgtaataccgctgtgtgcctttatctacttgagcatagcttgtttcctgggaaatgaatggattcaatctatcagtaaaagagttatgaaatgaaaaaatgcagattactcccactactagcactagtgccgttacaaatgcggttttaatagtacttttattcataatattcaccttcatcgttcaactattgttatactaaaatagtacactcattcaatgaatttagcaattgttttcatgaaaaaaacgcttgaaaaattccaagcgtctttcacctaagccaaaaatctttttatagcttcttctacactagcattcaatgattggtgcttcgttgcagcataattagccaatttttcatgtaatgaaggatcaatgcgcacattaaaattacctttaaaaggtttctctggtataactccatcttccttacagctcattagataatcatcaatggctccttgaaaatccttctccaattcatctattgtattaccttcgtaagaaataagactcttaatcccctgaaccttaccaaaaagaatcttatcctccaaagtatattcaattgaaccttcataacccttatacttcatatattgattagtttttttcatctttattcatctctttgattttatcttgaatttgtttgatttgatatggtaatagttcttttctaggatgtggtttatgaagaatgagactgtaaaatagtttgtgtaaggatgaatgattccttaaatttatttctttaaacattagaaaaaggagttcctttctcgtatgattggtttgaacaaaaaaacacatacagaaagaagaactccttcatgaatgattttaccaaagattttgctcaagctctattcaatccagacaaaataaatgatttattgcgcaaagagctacaacaggctgttaataacttgttagaagctgaattgaccgcctttctgggctatgatccctatgccagaaatggctggaatactggcaactctagaaatggtgcttatttccgcaaagttgatacgcaatttggcccaattgaagtgcaagtgcctcgggatcgcaacggtcaatttcatcagcacacgctgcctgactacaagcagcactcggatatcttggaaagcatgattatcaagctttactccaagggcgtgaccaccagggacatagccgatctaattgaaaagatgtatggcagccattacagtccagctcaggtatcaaatatttccaagcagatgattccaaaggttgaggcttaccacaaacgcaagctaagcgacaagtttttctgcgtctatttggatgcgacataccttcctttgcgccgagaaacatttgagcgtgaagcagtctatattgccattggcatcaagcctaatgggcacaaggaggtcattgactactgcattgcgcctagcgagaacattgaagtctggacagagatgcttcaaaacatgaaatcccgaggcttaaagcaagttgagctttttctttctgatggtgttgttggcatgaaaacagccttggccaggacttatcctaaagctcattttcaacgctgtttggttcatgtcatgcgcaatatctgcgctaaagtacgcgtcgacgatcgtgaaaagatcatgaacgaattcaaacaggtgcatcaacagacaaacaaagaagaagccacagctgtcctgcatgacttctataccaaatggggcaaggtttacagccatgttatcagaagcttgaaagacatagaaccagatctgctggtcttttataactatcccaagcagatcagagcttcaatttattcgactaacatgattgaatcatttaacaatgtgatcaagcgcaaagctaagcctaaggcagagtttccaactgaacagtcgcttgatgcttttattggcattcaggcaatgagctacaatgaccattatttcaatcgaattcataaaggctttggtcaggttcaggacaccttagaatcctactttgattaaataaataattaaaaaatcaatttacgagaaagatctatttacacaaaagatttgacagtttctgaagaatgatccgatcactgccctttttaaaaataattctagatccactcgtttttcctttattatcgagttgataatctagttcatgcaatagtgttttagcatctttaaagtcaaacgttcttggatgactatataactttattaatagcttttctaatttacccacgttatcctcacttaagtatataatataatatatcatttgtaactaaatttgcaactaagacaaattatacctaattcgctaaattcacgctactaaaaaagcgcttggaaaattccaaacgcttcttttgtttaatcatctagacctaacttcttaaagatatcatcaacatgacgcaaatgatagtgataatcaaatgcatcatcaatatcttccttggataggtaattcataatttcactgttttcaaccaatggcttaaactgcttttgctcattccatgatttagcagttagcttctgtaccatatcataagctttttcacgagatagacctgcttcatcgatcaacttaagcaacactcgttgagagtaaattaatccatatgtacgatccatattcttaagcatcgtttcagggaatacatctaagttagtcaaaattcgattgaagcggtgcaacatatagtcgacgccaatagtcgtatcaggcaagataactcgttcggcacttgaatgagaaatatcacgttcatgccataacgctacatcctcgtatgctgtaacgacatgtccacgcattactcgagccattccacagaggttttcagatccgatcgggttacgtttgtgtggcattgcagatgatcccttttggccagcgcggaaatgttcctcaacttcatgaatttcactgcgctgcaagccacgaatttctgtcgcccaattttcaatactagtagcaatcaatgctaatgtcgcaatgtattctgcatgcaaatcacgaggcaatacttgactagtaattggctgttgtgtcaaacctaattgcttcattacgctagtttcaactgcaggtggaacattagcaaaagtaccaacagcacccgaaattttgccagattcaacgccttttgcggcatgttcaaatcgttcaatatcacgattaatttctgcgtaccagcgagcaatcttgagaccaaatgtagttggttcagcctgaacgccatgtgtacgtcccatttctactgtgtacttatactttttagccttttctgcaatagttgcttttaattcgtgcagatcttttctgataatctcatcagcttgtttaagtaagtagccttgagcagtatcaaccacatcagttgaagtcaaaccaaagtgcacccattttttctcagggccaaggctttcagacacagttctagtaaaagcaaccacgtcatggtgggttacttgctcaagctcagccacacgctctgcagtaaagcttgcattcttagcaatcttctccgcatctgcttctggcacttcaccgagttctgcccaagcctttgttgcggcaatttctacttcaagccaagctgcatatttattttcgtctgtccaaattttccccatttctgggcgagtataacgttcaagcataaattacatttcccatggattcttcaaaacaatagtttgttcacgatctggaccaactgaaacagttaccaaaggaacgccaaccaactctgaaacgcggttcaagaatttcttagcattttctggaagagcgtcccaagtcttaacttgagtaatatcttcatcccaagctggaagttcttcatatacaggcttacatctgtataattccttcaaacttgctggataataatcaatcttttcaccatcaagttcatatgcagtacaaatcttgatcttgtcaaagcctgaaaatacatcaagcaagttcaagctaaggccattgataccagcaacacgctttgagtgacgcaatgcaacggagtcaaaccaaccaacacgacgtggacgaccagtaacagtaccatattcatgagcagtttcacgaatacggtcaccaacttcatcaagcaattcggttgggaaaggaccggcaccaacacgagtagtgtaagccttgcagacaccaattacagtatcaagacgattagcacctataccaatacctgaacaaataccaccagaaatagtattagatgaggttacaaatggataagtaccttcatcaatatcaagcatcacaccttgcgcaccttcaaataaaactttcttattttggtcaagtgcatcattcactaagacagaagtatcagttacatacttcttcattctttgaccatattcatagtatttatcaaaaatgtcttcaaatttaagtgctggcttaccataaaccttagtaaataattcattctttacttcaaggttagcacgcaatttttcttcaaaggtgtctttttcaagcaaatcacaaacgcggattccaattcttgaagccttgtccatgtaagttggtccaataccattcttagtagtaccaatcttgttagcccccttagcttcttcttgatattcatcttgcttaatatcataaggcataatgatgtgggcacgattagaaattctcaagccactagtatcaatgccactcttttcaagattttctaattcgccaaacattacttctggattgattacgacaccattaccaataactgtattgtccttggctgcaaaaataccagaaggaattaaacgcatcttgaaagtttgaccattaatatcaatagtatgacctgcgttgttaccaccatttgaacgaactgcaactgcagcatccttactcaaaaagtcagtaatctttcccttaccttcatcgccccattggcttcctacgactgcgactgctgtcatttaaaattcacctcataaaaatctctataaatattacgtatgctagtctagcaattaatttacaaataatcaatataaaatccgaattattttatttttaaattatttcatagttcgattttcatattgacaaacacaaattattcccatatagtatgtctcggtcaacaaacaagattaaagggagcagtttttaaatgagtaactactttagtatggaagcctttgactatgatgatatccaacttgtacctaataagggtattatcaaaagccgtcgtgatgcagataccagtgtcaaattcggaaaccgaacatttaaaataccggttgttcctgccaatatggaaagtgtcattgatgataaccttgctatttggctagcccaaaacgattattattacgtaatgcatcgttttgaacccgaaaagagaattaccttcatcaaaatgatgcatcaaaaaggattatttgcatctatttcggtcggcattaaagacagtgaatatgattttattgatgaattagtcaaggaaaaccttaaaccagaatatattactattgatgtagctcatggtcactccgtttacgtgattaagatgatcaagtatattaaggagaaattacctgattcatttttaacagcgggcaatattgctacgccagaagccgtacgtgaactcgaaaatgcaggcgccgacgcaaccaaggttggtgtgggacctggtaaagcatgtattacgaaattgaagactggctttggtactggtggttggcaattagccgcattaagaatgtgcagtaaatctgcttctaagccattaattgccgacggtgggattcgtcataacggcgatatcgctaagtcaattcgttttggcgctaccatggttatgattggttcaatgctggccggtcatgaagaatcacctggtaatgtaatcaaaattaatggtaaaacttacaagcaatactggggctcagcctctgaggttcaaaaaggtgcttacaaaaatgtagaaggtaagcaaatgttagtgccataccgtggctcaattaaggatactttaaaagaaatgaaggaagacttgcagtcatccatctcatacgctggtggtcgcgatcttaattccattaagttagtcgactacgtaatcgttaaagacaatatttttgatggtgataagtaattttaataaaatttttgcatttttattattttcctgttaagaatattacgataatatagtattatctatcttttttcgatagaataatataggtcgagttattgtagggtagtcaataactcggctttttttgattattttttaaaaacgattggacagagttttaaattgtgttatactagttgtcgttgatgaatgcgcccttagcgcaactggatagagtgtctgactacgaatcagaaggttgaaggttcaaatccttcagggcgcacttaaaaacgggaaatggctcagtttggtagagcacctggtttgggaccagggggtcgcaggttcgaatcctgttttcccgataagttagccgcacttcattgaagtgcggtttttttgtgtaaaaaaataagtattccctcggaaatacttatcatgctatgcccctttagtagctcgtctaaagataatctgtgtatctgaatctacatatttcaataacggtaaatcgtaatccttaacctgggccaaaacatttactttctcattgcatggcaaatcgcgtttagtaatctcgatttcgccttcataacgcggatacaaatgattatcaatcgtcacgctgccagttggtctagcataaatattatcttgcggctctgttgacaaaaacatcttttttctgctttcctttaagcgaactacgtcacgcgccacatctggacgattatgccaatcattgccaaacaattctggtatatcagtatctaaatgcagtgtaattgcaccctgtttttgataattagtaatcgattcaattgcatccctcgtaagttgcggatctcccacaaaaatgtgatcgcaatcataatctttcaattctaagatcgcagctaatgggttttcatatcgctgcttctccaacgttggcaatcctgcaaaaattggtccacgcaatttgccatttcctgaaataaaggctgctgttttcaaaccatattgcttaagccactcattcttcttttgcatccagtgtgcatcaagacctgtttcaggacgtgggtagaagttatgtcctgctgttaatttttcaaaatttgcattgctataacgcagatcatcaatattttgttgcgtaataatgctggcatttagaactatcggcatttctttggacaacttggcaataatatcagtagaaaatccatgatctactctaagaccagttagactcaaacttttaatttgctcaacactattgacattaatacccaaatcttgcagatcatctgccgtgacatctgcaataattttcaagtctagtttttgacaccaattagttaagtccgccagccgatttaaaatcgtctcactatcagtatcaggtacagctagctgagtaaaaacgcaggtaaatccactattgcgcatcgtcagcaaataattgtaattctcggacgtcaaatcgtgtcctagataaacagaaaatcctaacattcttattcctctaaaattaattaatttcttttattatctataacttaaacgctttcctaaatatcttactacattttttgcttgcttttttctaaaaaataatgttaaatacatataaacaaattaaaaagcgatgaaaaagacgagtaaataatctaattctttccagtgaattagtgctagtgtgaaactaatagaccctggattattgaaaaacacttttagcagctcactgaaacaacaattcttagagtaggttgagacgtctccggtacgttaccacgccggtggagcatgatagtgcttcatgagtcggtctattaaaatatagacaatgtgggtggtaccgcggaaaaaagcctttcgtccctgtttttttagggagcgaagggctttttctttgctctaagtacattagaaagaggacttatattatgacacttattttacctaaagattatcacccaacattaactgtgcgcgacactgaagctgcgattgtatttattcgtgaaaccttccaagataaattggcagaaattctcggtttacaaagaatgtccgctccaatgtttgtcgaaaaaaagaccggcttaaacgacaacttaaatggtgttgagcgtcctgttgcctttgacatgaaggcaatgcctaaagaagatactatcgaagtagttcactcattggctaaatggaagagattggctttgaaacgctatggtttcggaatgcatgaaggactttacaccaacatgaacgccatccgccgggacgaagatcttgataacttccactccatctatgttgaccaatgggactgggaaaagattattagtaaacaagaacgcaacaccgacacacttgaagttactgtgatgaacatttttaaggcaattaaggcaactgaaaagctggttgctgcacgctacccaggctctacttatcgcctagctgatcacgtttcatttattactactcaagaattagaagatcgctggcctgatctttctccagaagagcgtgaagataagattgctaaagaagaaaaagccgtctttattatgaaaattggtgacaagttaaagcgtagtggtgaaccacacgatggccgtgcaccagactacgatgattggcaattaaacggtgacttagtcttctggtatgaaccgcttaacagtaagattgaaatctcttcaatggggatccgtgttagcgaagaaagtttgcgtgaacaattgaaaaaagctcactgtgaagaacgtgagaaattaccattccaccaaatgcttttgaagggtgaattaccttattcaatcggcggcggaatcggtcaatctcgtctctgtatgttgctgttaggtaaggctcacattggtgaagtacaagcttctatttggccagaagatatggttgaggcttgtgaagctgacgatattaagttgctgtaattttaagatttttttacataccaaaaaagatcctgcaaaatgtaggatcttttttctattgattttatttccgttctcttctagaaatccaagccataatcaatggcaacaatacaaagccaaagaccatcatcgcaatggcataccagttaacaccgataacttgccctgctgcgtttactacaccaaattgtgccttccagttatattcaactaacaagaagatcacaatcacaccagataaaattggcacaataacatcagtcataacgctcttattagcctttaagatatcttcttttgccttaccacggtaaaattgaataactgctagaggtaccacgatgaaacctaagaatctaaccatcgcgctcaaagtaatcaagttgaccatattgtattcaaaggccatcggaatcaaaattgccaagccaacagagataaagaaagttctaattgggaagttattcttagttctcttagttaaagcttgtgacatctgaccctcacgagccatagcttccagaatacgtggagcattaaagctggaagctacgttgatcccaaacattgaaaccaaggcaccaaccaagattacatcacgtaagatttcattattaaaaatagccgcaatcgctacaacttgcttagttgtcattaaagcacgtggattaagtaccatcgctaccgctacaacgccgatatagacaaccgcaataattaagattgccaatggaattgctcgtggcaagttcttttcagggttcttcatatcttctgaaccagaagctactgattcaaagccggtaaaggcatagaaggctgaaacaattgacatgacaaaggtagttgtagttaaagttggcacaattttctgaccattctgagtcaattgatctacttgccctaggttgcttgatgcaccagtagtaattaacaaaactactccagcaataataattaataccaatgcagccaacttaccgatagtagctaaattcattacatacttaactactttttgaccaaacaagttgatcacggtaataattgccatcaagatcaaaaagccaattgtgacatttattgccttattgggatttccgccaaaaattgaaatagttgacttaattaccccaacagccattacgccccaagctacactggctgagaagtaacgcagaactcccatataaaagccaatttttttaccaaaagcggccttggaataagcataggcagcaccagatttagtgacatactttgaagctgccgcaaacgaaatggccagaatcgctgcaaaaattgccgcaattaaatatacaactaaagctttactaccggcttgctgtaccacactaccaggtgttaaaaaaatacctgaaccaataatggcattaatcgctaacagcacaattgaccaaaagcctaatttatctcctgttttttcagtcatctatttgcttccttactttgcattatcaacaacaaacttaaataagttattcataaacgctacatcggaattacggtgcaacatttcagggtgccactgcacggcaatgacattaccttgtttattttctagcccttcaaccacaccatcaggagctgttgccactgcttttaaatctggtgcaacgtctttaattaattgatggtggaaagaattaacgcgaaattcagttttgcccaaaatttcagccaatttactatcagcttccacttccatactatgagtaggcaaagttggcgtatgaccttgcatgtgtttcaaagtaagttcttttctgtatgaaagatcttggtaaagcgtaccgccatgagccacattaataatttgagcaccacgacaaatgccaagtaccggaataccattttcttctgctaactttaacaagcgcatatcaaaatgatcgcgttcaggccaagtagcaccaatcttttgcattggctcctcaccataaaaacgtggatcaacatcatgcccaccagataagatcaagccttgaacatgattaagctgttcacgaatcacctcatcattttcagtaaatggaataatgtaaggcacaccgccattttgaactactgaatctacatagtcttcgttcacataactacgatggtatcctgggaaaattcctctatcgtcaataattacagaacctgagataccgataattggttttgtcatttatgctcctccttctgcttactttttgtatgtaatattatagagaaatttatgcaaaaagtacaattaaaaaattgcattgttgtctataatttttgcatatctttaaatatagtaaaaaacagcaagccttatttttagctcactgttttatgctatttataccaaattccaaaaaggatttccattacatgctaaatatgtttctagccactgtttaaaagagaaatcaaaatattgttcctctattccaggatacgttagataggactgtttttgattgtagcgatctaaattaatgcccatttctccctcgtctcttaaccaaagtataggtagataattaggtgttttaactaactgatttaagacatactcaatagtgtaaattctacaccttgctccacctaattcgatgccttgaaaagaatcaatgaataattctgcaccgttagcctgtatccaaaactctatcaaatcatttgggacagatatgcctgacaacctatttattttattttcagctactggcggatttaatttaaatttacagtaatagacgccaccaaaaccaaatattggtacgtcgacactgcattttttactaatcaaatttatattatctattatattatccattttaataattaataaaccatttagttataagcttatgtgcttcaattggtactggcattaagttgtcaaagtcattatttccaccataaattctaggtcttatatgatgaacttgattttcagcccaatactcttttgattgattgccataacgctcactaaactcttttatatagtaatatctatccatcgtagtccatactggtgaagaaggaagtctagaccaagtagtattgattggtgtttctgcatcttttttagagacaggatcaacatattcaggaaaattttgaccaattttattttgtaaataaatagaactaagtgaaattggataagtagcgctatttccattatagcctaccattccccatgctcctccaacagcaaaaaatgttgtagcagctggaaatacagcagaccctaacaaaccagtagtaatattgccttcttttacaattggactagctgtatttgtagtaattgggccggacaatgatggttcactatagaattgcaattgaactgaaattgcagcaggagctggaccagttattgaatcaatataaaaattgattttaaattgtccatctacatactcttgtgaagtatgaaatttaacaactgtatctggaatctctgccaaaaaagtatatgcagagtaatggctacttgttgcattaaaattattatgaatttttacagttccattttttaaaatagggacatctttttttacattttcattctttaacttatcttgagctaaagaatgaaaattttgttcattagctattttagcaacattcttatttacatcatttagcgagtcagcctttgcatttgtattgatagctataaagcacacgatagtggctaaaaaagcaaataactttctgtatttcatgtttctttcctcattatctataatttttaacacaattataaggatctttctattattctaccatacaactctatcacataagcaagtgctcccacactgtagcatcagatgctactgggatttacactctagattgatgtatacgaagaacacaattacaatcagaataacatgaaatactactatagcgacaatttaaaatatacagtaaaatctttaaactgtatttcttattctaacccttgttcaaagcgatactgccgtaatacatattccttgaaaaacggtaaagtaaaggccacttcaccataattagtagatttgataacttgatcatctaacaagcgtctacgatagttagcaacaaaattgcttggacggtttaacctttcatgaatttctttaattgaaacacaatgttttgggctctgagccatagctaaaacaaattttcggtcttgctttgacaaactactaagtactttggtataaacattttgctttagcaccaataagtactctgatttaatacattctaaagtgttttgatctattaccttactttttttagcagctttcaaaactaaataacctagcaactgaaaggcatatgaatagcccattgtcatcaacgccattttttcaagaatttttttcgacacttgataacctgattctttaaaaactttactatagctagcttcaacctgtgagagattcaatgctgataaagctattcgctttccacgtagtaagaatgaagttatattttcgtttttcaattcagagatattttcagaaagaccagctatcattaaggctataggataaccctgccgatttaataattgataacatcttgcaaaatctttcaactcctgacatagttttacttcgtctaaggtaatcaacactttaacgtcattttttcttacttcatcaaacatgttcgttaaaatatcttgatatgttaacttactaacgtctgtagaaagcgataatccaaaattagagaaatttagtccttcaatagatttaaatgatttttttagttttgaatctgcattcagatataagctattaataaaagaaggcaacaacttcatccccatggccaaattaacaacaatccaatctggatatgcactaatctttctgtccattgctgtcaaaaagacagttttgcctattccacgcattccataaacaatcgaaattgtatatgaactatttaaattctctattccttgagacacatcagcaattagtttttttcgctgcaaatacactgctggaattcggccaaagctaggattaaacggattatccatattttgtccccaatcattttcttatcaaaaaagcagcaggcttcttacctactactcaattttatttatctttttgatgcttaaccacataaatcagtgccgcaataatcaacactgctgcaccaaccgctactgaaatttgcgtctccggattaatgaacatgaagacaacaattactaccagcataatcaaagcaaagtaatttgaatatggataaagcggcaatttaaacgggtgattctccatcaagtgtggattctttcgtctaaagcgtaactctgctagcaggatcacaaaccaagctaccatccctggcaaaacagatgaactatagacaataacaaaaacattagccaatgatttattcaaaaattgggctaacacattaagcataaaaccaacgaaaattccactggtaattccaatgatcgcatgactaggcacgattctcttagatacgtgaccaaaagtcttaggtgcttcaccttcgtgtgccaatttatacaacattcgacttgatgaataaattcctgagtttgcaccggacaaagctgcagtcaaaactacaaagttaattactgaagctgccgcggtaattcccaccttggcaaaggtcgttacaaacggtgagccaatgctatctaatttattccatggataaattgtgacaatcacaaaaattgccccaacataaaagatcaaaatccgccacaatactgacttcacgcttttaacaatggccttatgcggatcagatacttcaccggctgaaatcccaattagctcaattccttcataagaaccaacaataatggccattgagaaaaagaagcccttgagaccaccagtgaagaagccgccatgactccacaggttagaaaagcctactggatgaccgccattaccaaagccaaatagaattaccgcaaagccaagtaaaatcattaagataatcgttacaaccttgatcatggcaaaccagaattccaaggttgcataagctttcgcactagctaagttagccaccagcaaaaataaaataataattacgccggcaacccaatcagaggtgcctttccaccaaaagcgcaaatactctgttgttgccaccacctcagaaattccgacaacaatgtattgaaacacgtttgcccattcggctaaatagccggcaattggatgcacatgctctgaagcatagtctgcaaaagaaccagtacctggatcaacataaagcatctcacctaatgcccgcattacgatatacaaaataaccccaacaaaaatataagctagcagtactgaaggaccggtccacttaatggttgagctagcccccatgaatagtccaacaccaattgctcctccaagtgagatcatttccatctgtccggctgtcatcgaccgctttaattcaggtgctttcttcgccatttccaactccctttctttagcatctgtaaaaatttcctaggaaatatatctattctcatttatctttaatcactataccttatcattttttcgaacaaaactgtagctgatcgctaaaaagattgcaaataaaatcgaaataatcaaagccagctgcgttgatttgataaagaataataagattaaaataccaatgtaaaaggcaagcgtaagccagctagttactgggtagcccggcattttaaagctgcctaaattctgcttattctgtttgcgataaacaatatgtgctgccataatcatgatccaaacaatcacaaaacaaatcgttgaaacagttgagacaacggagaatatttctgctggcattaaatagtttaaggcaactactacaaataaaattaatgaagaggtcatcaaagcgttcattggaattgcttttttggtcaattcacctagtcttttaggtgcatggccgttacgtgctaatgaataaagtgatcgactagttgaaaagattgcactattagtcgctgacatagctgcagtcaaaacgacaaaatttaaaatccctgcagccgctgtaacaccgatgccggtaaagacctggacaaagggacttgaagtagttgtaatgtgattccatggataaacagacataattgccaacattgagcccacataaaaaaggccgattctaactggcaaagtgttaattgccttaggaatatccttttgcggattagctgtttcactagcagtttgacctacaatttctaccccaacaaaggcaaaaacaaccatttgaaatgataaaagaaagccccaaatcccagttgggaaaaagccaccatgattaactaaattagttagtgaaacataaccgccctttacatgcgtatgaagtaacaacattacagcaccggtaatgattaagactacaattgccattaccttaatcattgagaaccaactttccagttcaccaaataatccgacatttaccatgttaatcaacatcaataagatcacaattactaaagggccaacccattgcggtagccacggaaaccagtatcttaaataaattcctgtcgcagtcaaatcagccatagctaaactaagccagcaagcccagtacatccagcccgctacaaattcggcacgcttacctaaatattttttgattgactctaaaaatgaatgactatcaggatcggctaaaataagctctcctaaagcacgcatcataaaaaaggtgataatccctacgattaagtacgacaaaataattgaagggccagcactatgaatggctgaaccagaacctaagaataggccagtaccaatggctccccctattgcaatcattgttacgtgacgactcttaagcccgcgttttaatctcggcttctcatccataattactcacaccttcctcaaaataaaaaatggagcggcatgttttttaaatgaaacatgttgctccatcaagtttgctttttttgaattatatagtcttataccaattcatgcaattattttttatctaaaaaagatattcccttaggaatatcttcattattagtaaactttaaattggttcaacggccagtaacgtactttaactacgccaacgatactactacgcttaatggttccgatataacggctatccttagaaacgctccggtgatcacccattacgaaatatgttcctttcggaatgcgcccagtatcctgcacatatttaatctgcgctctagtaaagtattgctggtaagtccgcgcccgcatcagtgactgcatagtaaaattctgagtctcagaataaaatgtatctgagccattatcaattaacttcgttccttgtttcaaccaaggttgagcaatctttttattattaatgtagatttgattatttttgctgacgattttttcaccaggcaaaccaataacacgcttaatgtacaaagcacctggttcatctggtgctttaacaatcactacttcaccacgcttgatttgcgcatgacgctcagcgattagccgatcaccattttgaaaagtaggttgcatcgaaagacctgatactgtatcgttgctcaagacgaagtggaaaagcagcagataggcaccgatcaaaataacccagataattaagatatctaggaaaaacttaccccatgattctttttcttcttttttctcagccattatttttctccatttatctttttccacagtttacaactttatggagaaattgccaaattacaaaaaagaggtatttcctcggaaatacctcttttattattaatgactattaattagtcttcttttttgtcttcagttttagcttcgtctgaaacttctaccgttacacccttcttagcaagaacatgagacatcttcttcaagtaaatgttaatgatcttgcccatgtcttgttcagtaagtgagttgaatggaacgattgcgtccaaacggttcaagaattcaggtctgaagtagttttcaagggctgagattaacttgtcttggtcaaccttgccatcttcaagcaacttgtctgagaagccggcgtttgaagtcataatcaagatagtatccttgaatgaaacagttctaccttgtgcgtcagtcaaacgaccgtcatccataatttgcaataatgcgttgaagacttgtgggttagccttttcaatttcatcaaataaaattaatgagtatggttggtgacgaaccttttcagttaattgaccaccttcaccgtagccaacatagccaggtgctgaaccgatcaacttgttaactgccatttcgtcttggtattcactcatgtccaaacggattaagtgttccttgttaccaaataattgaattgccaattgtttagcaagttcagtcttaccaacaccagtaggtccagtgagtaagaatgaaccagtaggtctgtcgctgtctttgaaaatttgcttacgagcaatagcgtcagtaattacatcgatagctctgtcttgatcaataacattcttcttaagtttcttagctaagtccaagttcttttgagcttcatcagcgtgaagttcactcattgggatcttagtcttttgttcaataattgcgtagatgtctttttcagttacttctggagtattcttagaatctacattcttaagttgtttctcaagttcagcaatcttactcttaatttctgaagccttgtcgtaatcctctgccttagcagcttcagtcttcttagcttcaagagctgagatttggttctttaagctcttttcatcagttgattgtacaagcaatgccttcttagcaccagcttcatccatcaagtcgatagccttgtctggtaagtaacggccttgaatgtatctttctgataattcaacagctaatttaagactgtcgtcactgtattttacgtggtggtagtcttcgtacttcttctttaagccttccaaaatcttaacagctacatcagtagatggttctggaacttgaacagcttggaatctacgtgataaagctggatctttttcaattctttggaattcactagtagtagtagcaccaattaacttcaattgaccacttgccaaagctggcttcaagatgttagctgcatccccattgttgttttctgaatcagtagaaccagcaccaacgatgttgtgaatttcatcgatgaataaaacaatgttaggatcgctcttggccttgtcgataaccttctttaatctttcttcaaagctaccacgaagacttgaaccagcaaccatgtcattaatatttactgaaatgatatgcatgttagccattttagctggtacattacctgaagcaattctttcagctaaaccttctacaatagaagtcttaccaacaccagcaggtccgattaaaacaggattattcttcttacgtcttgaaagaatttcaattacgttatcaatctgttcgtcacgaccaattactgggtcaaatttattgttcttagcttcctcaactaagtcaacaccaattggcttttcattgggttgttgtgggttctgttgaattgtttgtggtgcagcacccatgctgctggagtaattaattggaattgaacctgaactgcctttgctatttcttctgctaccaaagtcgtcattaaagaatgagctattcaattcgttaaataagttatcaaaatcattgtcaaagtatgccatatgtgcaacactccctatctcaaatttacgtctttagcactctagcttatcgagtgctaactcattacatttaatagtatagcaggttatccacagactgcaagctaaaaaacaaaagttttacacattttcctttatttttgtgatttttatttaaaaaagcactacaaatgctgcaatataaacatttgtagtgcttcacaaattataaagaatttcttaagatgggcaaaaattgatgattattttgcttaaaactgttgaattttaaggaagttttccacagataagaataagtttattaccataaactatttctgcctacctctattattgcccttttgcttgtccagtattttgcggttcgctcaactttctcggcccaagaaaatactgtttaattactttgattacctgcttattctgaggtaaatccgagtgatccgcttctacacccgttactgtcattgcagtatagctcttgacttgattctgaaaaatatattttccggctgctacgctagcttctggtacaattccatcagactcataattttttccaccagataaggaataaacaatcaagtttttcggtagtttatctttgttcttgataaagttttctagcatttgcgttttatgattaatatttttttcaccaaaattatatggcgttcctagcgtcatcagacgtttgattttaatttcatcagaatagtaacagtagtaatgttctaaccaataggtccagatcaagccaccgttagaatgcccaaaggctttaaaattattaaacttatagctctctgataaggcataaaaggcttgatcaaaccagctggcttgcttcttaatattgctataaccatcgtgattattttcaaaaccgacaataatgaaaggttcgttgtcgtttttattaattttgcctgaatatgacagcgttccattcgttgaaactttaattttaagcacgctatgcttagtcggtgtgttctgatttagctgcttcactaattggttaaaacgttcagtcgttgcactagaacctggaatcataattactggtgacaaaagcgatttgcgtctttcagctctagcgtggttatcagccttcatccaagaataacccggaatagccaaagctactaataagactaagacgattgccaaccatttaaaattaggattttgaactaaattaatcatttttttcttcataatcctttagtcccctttcaagtcgcaaacctaatttcatagttggaataaacattattatacgcgtggtgctagttaaatcgttttagttaataaaaaagtccaatcttgttagactcgacttgtaaatagtaataatagaaaagagtctgatctgattgaactgccttaagcttaagcgttttagccaccatttacaagttagttttaaagatttagtgataatttgtcggcactggtatcgtttgtatgcaccggctgagtttactcatcggcgaaatattgatcaaattaaaactacggacagtctgattttggctttacttatctggcaagctaagacaggaattgaatcacaaagaagattctgtgaatgtttcaattgtttatcacactcacgttttaatcggcgttcacgtcagctattgcaattgatttatcagatacggcaagaaatgaataaaaaggttgacctgaatggacagttcttgatcattgacagctttccggtacctgtttgccaaccaattcgaaactatcgtgctaaaatttttcgcggttatgccaacattggttataaggccaccaagaaaatttacttctatggtttcaaagttcatgccattgttagcgatgacggttacattcttgattatgtcgtaacaaaggcatcagttcatgatgccagggagacagttgaactgatagaaaatacccatccatctaattactatcttcttggcgacgaaggctatttaggcaaagaactgcatcaacagctaaaacaaatgggttacgaactttggacaccatatcgtaaaaatatgacaggagctaaaaagcacaatgatcatcaattgatggctattcgcagaacaattgaaagcgacttttcgcttctgacctattacaatgccgagaacaatcgagcacgtagtctgataggctttcaaagccggttggaaattgcaattttagcttataatttggcttattgtctagaacgatttaactagcaccacgcgtattattatatccaaaatgaataacaaaatagaaaataccaagttgctccaatcaccattggaaccaaagaaagagaccaaaattcctggtgtcccacttaaaacggggtaagcacaaggttgaattaaatggcaaaaaattgctccagcggctagtagaatattaataattggaataatcacaatcgccggcagtaacaatggatttaaaataatcggcatcccgaccatcatgcctccagttgagcccaaagctgctggaagcaggttaaccttggcaatattttcactatccttatttttactataaattaggataattacaatcatcgctaaaacaatactcgcaccacccatttctgcataaggataaaacaaagaactacccaaatacttgtatggtacattccaagcactcccatgttttaaggcaaaatttaagttagctgctgctgaaatactattagaagtagttgacaaagaagctagaggataacctattcccatccagctaagtaaaaagactgggatagtcagtaaagctattaacaaaatattatttgattcctgtatttgagtaactaggcctttaaaagtactagaattcaagaatttgatttgaaattcataaattataatccccagaactatcccacaaaaaattgcaaatattgtcgggataaacgcattccaggctctttccttaattctagcggcatgttcaaaatcgactggcttgtgttcctttcctagccaatgaaaaatttgccctacaccatagccaattaacaaggccagcaagacagcattaatttttaaaacactggaagaaaatggtgaatgatcgctggcattattagctaaattattggcataagcacaaaacatgataacgatgacagccgtcatcccggccatggttgaatctttacggtataaacgcgcagtataacgtgccgcaaaataagccgcataaataccaaataagccgaaggttacccgaaccatcccccgactgacaaatgctcccgcataccaaaaacgatctggcaaagtgatatcaaaattaaaaatattgtaaataaaactatcgggcgaaaaaacggcatctctgaacaacttaaaatatgccccaattaccgcgatcggcatcagcataaccaacgttcgctgaaaaattctaaagattgccaatcttcttagtttaagaaagatatttgtgattctgtttaccatggtattttcctttacctatctattctaaatatgattgaataaagttaattaaaacaattattaattatacatctatactagaaagctgattatgatggcttacattaacttaaaaaataatactaaaatttaccaatctggtgacacaaccatctatgccaataagaacattactttttctatcgataaaggagaactagtcattattctcggctcatcaggagctgggaaatctactttgcttaatattttaggcggaatggaaccaaatacaagtggcgatgtaattgtagcgggaaaaaatattgcaaaatataacgctaaagaattaactacctatcggcgcaacgacgttggctttgtttttcaattttataatttgattcccaacttaacagcaaaagaaaacgttgaattagctgctcaaattgtccctgatgcgatgagcgccgatgatgccttgcagtatgttgacctagggcagcgagaaaacaattttcccgctcaactatcaggcggtgagcagcaacgtgtggcaattgcccgagccatcgctaaaaagccagccttacttttgtgcgatgagcccaccggtgcccttgactataaaacaggcaaacgaatcttaaaaattttgcaaaatatgagccggcaaaatggctcgacggtcttgattgtaactcataacgccgctattgccccaattgctgataaggtcatccgtattcacgatggaagtattcaaaaagtccagcataatctacatcccgctgatattagtacaattgaatggtaggtgggcgacatgcaaaaaactattctatggaaagatgcttggcaagcaatcacccattcacttgaccgttacattgccattattctattaattgcactggggacttttgcctttacaggtttaaaaatggctggtcctgatatgcgagcaacaggggcagaattttttgccaaacataacttagctgacgtcactgtcacttcaaactatggcattaattcaactgatcgccttactattcagaatttaccggaagtaaaagaagctacttttggctattttcaagatgttaaaattaaaaatcaacctgatacgctccgcatcttttctcaatcagataatctttcaagttatgaattgattaaaggtcattttcctaagaataaaacagagattgcactgtcatatttattgcagaaaaaatatcgcttggggcaaaacattacttttaataaacctggcattttaaaaaataagacttacaagattgttggcttcgtcaaagctagtgagttcttagataaaaatccaatcggtcaaaccaacattggcagtggccatttaactggaattgcggttgctaatcataacgccttcgccgcaccagtttatcaaattgcccgaatcattttcaaaaataccgccaatttaagtccctttggcatagcttaccgcaaccgtgtttataacgatcaaaccaaattgcaaactgctttaaaccaaaatcgagccgacaaatatgacaaatatcgggccatgtatcaaaagcaatatcgacaagctgcagctaaacaattacttaaacgtggcatcgtagttaacccggcgcaaatcaaagtaccacagaacaagcttaaaattgcttatcctaactacgtaatcaacagccgtgaagaaagtcagggttatgcttcttatcgagcagattctgaacgagttgaagttttggctaatgtctttcctgttttcttgtttgctgtagcggctttggtcagcttaactacaatgatgcgttttgttgaagaagaacggactaatattggtacgctaaaagcactaggctatggtaatggagcaattgccattaagttcttgctctatagcacctcagctgcaattttaggtgttattctgggggctagcttaggttacacctttttgcctaacttaatcatcaaggcctatttagctagctcaaccttaggaactgattaccagctgaattttgcttggggaccactattaatttcattgacgattgcactacttgcaacaaccgtcgtttcaatgattactttagctcaaactctgcgtgaacagccttcagctttacttttacctaaaccacctaaaaatggttcacgtattttactagaatatattccatttttatggaagcacatgagcttttcagctaaggtaacagcccgcaatattttccgttataagagcagaatgctgatgaccatcctaggcgttgctggttgtactggattactagtaatgggatttggtattcgtgattcactacacggaattggcaatattcaatattctgaagtacaaaaaaatgatgtcatcgctttgaaaaaccgccatgttaacacgactgagcgacaaaaattaaacaaaatttttaccagccatgatgttacgcaaactactgctgtacaatatcaacaattgactaaacaccttgatagcactggagcaactgaaaatgtaatgctaattgcgccacaatcaactaaaaactttagcaaatctatcaatttgcaagaacgtcaaagcaagaaaaaacttgttttgtcaaataatggtgtagtcatttcagaaaaattagctactatcttgcacgctcataaaggttcaacaatttccttaaaaaatgaacatgggaaactacttaagttcaaagttagtggaatctgcgaaatgtatctcggtcactatatctttatgagcccagctgaatatgccaaagaaactggcaaaaaatttactactaatgcctatttagtaaccatggccaaacattccccaggaaatatcagccatattagtcaaaaaatgatcaaaacaggcgcaatcgaaacggttgtctcaacttcatcaaatagaaaattgctgagcagtttcactggtagtctaaatgaagtcattctaatcctaattttaatttcagggatgttggccttagtagtcatctataacttaactaatatcaatgtcgctgaaagaattcgcgaattatcgaccatcaaagtgctaggattttacgataatgaaacaacgatgtacatttatcgcgaaacaatcatcttatcggcactaggaattatcgtaggctttggctttggttggtggctacaccactttattatcactagtttgccaccagatgtcgcgatgttcgatccgaatatgtacccgttgaacttcgtcttctctgcgctaattcccgctattatcaccgctattttagcaattgttgtccatcacaagatcaagcgaatcaacatactagatgccttgtcctccattgattaagcgctgttatgctataataatcactatagaaaagggtggaaaaaacatgccaagaaagcactttgaattaaacagtgatgttaataaattaatcgaaaaatatgatgaaattaataatgttgatttcaataagttagttaacaaggccttaagattctaccttgttaatcaaatgaactacaaagatgttcaagacgccctgaataaagctgataacgaagcttctaagtatattgatgaagcaatgcgttccagcatgggtgatattaatcgaaattattagaacataactaatcatggaaaaagccatctgttttgacagcaggtggcttttagtattcattacaagataatttattataaaaacaactaattgataatttctttactcaaaatgcttataccgataatatcgataacctatctttttaccaaaaatagtctccgaagttttcatccaattagccagcaaaacataaatgcctaaaaagactaaaccgaagattgctaaataaccaaaactaccaacacggcctaagtcgttgaaacgatagccaaataaaatttggtaaacaaagagcaggataatgtaaatctcgtttgaaacaatgatcggcaacaaactccccatcttaacgccatatgtcttattaagcttgtgataactgagccaaattaccagtaagaatgaaatatcagttgaaagaattgcaccatccccattcatgaacatagtcatcggtacttgcaaaattatttttactaagacaccttcaaccatatagatcacagccagtttgttcatgttcaaagctaaaagcagtgttaatgaattcatcaccaaaccagcaaacaaactttgaacaatattttcaaccaaataatacgcacctaaactatcgtgtgagaacaagaccgtataaattggagaagccgcaaaagcaccaagtgcaacaaccggaagcaagacaaataatagtagtctatagttctctaaaagcagctttctaatgctttcttgactatcattagccttatacttaagccctgctaaaagcggcagactagtctcagaaacggctgtcgcaagtgaaataatcaccgtggtaatcttgcttggattagccgagaaaattgtgtacaagtaactaacatagcttttactcatatgactgaagctaatcaggatttgtttaaacaaaagttgatcaactaattgcgtaacagtaatgaacgatcccagcaaaacaaacggaattgaggcataccataagttaagcaaactacgagaaacattattaagtgctctgggctcgctattttcaattaattctcggtaatgtccccactgcttgcgcatatatgcaaaaagatacaggtaactagctatagcaccaacacaggcgccaaacacactgaaataaaccgccgttacgtaatcatgatggaagacttcaataatcaacaaagtagccagcaaaataaacaaaattcgagcaaattgttcccataattgggaaatcccatatggcttcatatcattatttccctgaaaccaacctcgaaccatactcattgatggcagaattactacggctggcactaatactcgaatagaaattgttgcactagccactgaatccactggactatttttggcaatcattggtgccgtcacataaagcaaaataccacacgctattcccatgaccagcataatagcgaagcctaatttggtaatgtacaaactgtctttatatctattttgcgaatttaattgcgatacttcccgggcaataactgaaggaagtcctgccgtcccaattgataaaaacagcgcatacggcgtatatgacgaattgaacagcgcctgtgcgtttaattggttgtggtagcttcccagcataattagccaaggaatcaaataaacaaccccgagaattctagatacaatgctaccaaacgatagccaaaatgaaccggataggatttttttattcaatagaatagcctcaaatctacgttagtttctcattgtgccttcttattatacgtggattttataactttgtgggaaatatgtaccaactagttacccttttttaacaaatttttcggctctaataatacaaatcagttacattatttactatattgttacccagcctttaattttacgttagaccccttgacctaaccttctttaattattatccttaaaatgtttctgttaaaggtcataattagacaaaaataataatgtattaagaatattcatcgggggaattaagttgtcattcaagaaaaagattatcactaaattagcttatgttgctatgctttcaactactggcgttgccgcagctgcaatcgtgcaaccacaagcacatgttcaagcttctaccacttcagttgctgctcgctcactcggaatcgatgttgctagttaccaaagtgctgatctttcagctcacgctaaaagcggtgctaagtttgctgttgttaaagtaagtgaaggtaccagctacagaaatcctaaggctagtgctcaaatcgctagtgcccgcgctaagaatatgatgccaatgggctaccactttgctacattttctgctaatagcgctgctgctaaaaatgaagccaactacgcaatcgcatcagctaaggctgttggtcttggtgctggctcataccttgcatgtgactatgagtcaggtgacggcaacaatatctatggtggtaagaatcctactgctaatgcaattaatgccttcatgagcaaggttaaagctgctggttacaagccacttctttacgctagttcatcagttttaagaaacaacattaacactaactctgttgttaacaaattccctaactcattatgggttgctgcatacgctgtttcaggtcgagtagacaatcctaactttgactacttcccatcaatgaagggtgtttcaatttggcaatttactgacaactggcgtggtcttaacgttgacggtaacattaacgttttacctcttacttcatcaggtagcgctgtttctcaagcacctaagaaggctcgcgtattaaagaagaaggctcatgtatataacaaggctggtcaccgtacaggcaagactattaagaagggcacttctatcactacccatggcaagaagaaaactatcaatggtaagaaatactacaagattgccaagaatcaatacattagatcagctaacctttactaaaaaggcaaaataagtcatcaaaaaatgcaccaggtagaaattacctgatgcattttattttatccaattttttacttggcgaattgttcaccagctaagttacggtagaagttagccttagcttgacggtaatatgggttaacccacaataaaccgatcccgcaggaaataataccaagtagccaccagccgatgaaacttaaatcaaaaataaacaagtccatcttatggccatccatcaacttacggctggcactgatagcttctgtggcagtcggctcatgaccactatctagcatgtcacgcaagatatatggtgtcactgcatatgaataagccttgatcagccctggaataatcagtaaccaagtccacaaaataagaaaaatttcatataaaatataagttaaaaagttactcttaaagtttctggtaaatggactaaagatacctgaaagaacattttccttagtaccactatctctaaaatgcaagatagtataaattacgccccatgtgattaagccaattgcaactgaaactaccaaagtaatcagccatgcaaaaggattaactcttactttatctaggtacatcaattcagcattgttaccgaagcggcggacaataccgtacacgatatcttcgcccttttcaaaaaagttttcgatatcggtcaaaatataaacgattagccagccaacaaatgacagcaaaactgcccagccccagttaccacgtaactggtctctagcttgttcttttaattcttttcttgtagtagccattttctctcctcctcacttttctaatcatgagtattgtcgcctaaaatcagggcagaatcaattaaaagcacatcaaaaaagcctaattccaccaacatcggaactaggctcacacagtgttgaccgccactctgaccacatatagaagataacattttcgctaccggagaaaatgactactaatagcgacggtacatgatagattttagcattcaactacctaaaagacaagcgaaaagacgtgttgaattagcggaatggataccaaaatttacggataaaaaagacgaggtctaaacctcgtcttcttcattactaaaattcaagcatcatcgtcattgcacgattgatcttctttttaatctttttaaactcaccagaagcagtatgattatcctgcaaaatgatcatgttctggccatctttagttgcccgcataaaggtataatacccttcaccagcaccattagcagctttataatgctttaaattataaagtccaccattataatagctaggagcctgacccttgaacagaacttttctactcttgttagtcaaaatcttaccagcaagaatatactgcatggtcttagctaaatctgcgttagacattacgattgaaccagcacccagctcattgtgagcatccttaacggctttagcatggttcactttgacatattcaccctcacgcatttcatagcctggtacccaatgactagccaataacttagccttgtctgaccacaagaactcactatgggttagcttcagtggcttgatatatgtgtcatggaacaattgctcgtatgactttttctcaagcttggacaagattccacaaaggaaaatatagtttactgaagtatagtgccacttacctaatttgctagcatcaaacacagtatattgtgcatcatgcttgatgttcgcttcatcagagataaactcaggcgtacctaattgttgaccagctttcaaatccagccctgatgtcatatcaattaagttgctaatcttgactgaactagcaccatctacatttgggtagaattttgaaagtttatcgctaagcttcaactttcctttctctacctcatgcatcaccattgcagctgtcattgacttttgaactgaattgatcaaatagctagtgtcaggtttattgtccgtcgcataattaagcaaaactttgccatgatttattactaaaactgagcctttaacgcccacatggtcaatagcctggcgcactattccgcttttaaacggtctttattgcttaaatcaactcgtttaacgttatccttgttttgccacttcttggagtagaagtagttagacatatcatagtcataacgcttattaggttccttcatgaatggacgaacagcttgatcaactgcaacccagcctttccagcctaggtgaatagtatcttgcataaagtacttttcattgcctcgtcttgaaagatctgcaatattttcaaagccttgactggttaactggtgttccatcttagcaacagactcttggtacatcttgctagataaaccagtgtacttcatccacttgccattaattggtgggatgataaatagcacattagtgtgttgcttagcaaactgctccaacatcaattggaaatcaccatattctactgaatgtacatagtcaaaatcacgctgactacccttcaagcgtttcaataccttctttggtaaacgtgttctaaagaaggtattatcaatacctaagttgtttgagttagtgtgtatagcagcttgctctgctgcaaccttattcaaagcagctacagaatacttgttaggtaaaaccttagctctcttttgaatcttatttacacgatcacgcaattggaatgagctgaagaaattatcttcgttacgcaacattcgacgacgattttgtaaataaaatttttggaagctagtcaacttcttgccttgagcaatttgcttaaggctattcttgatctcgccctttacatttggcatttccaacagacgtttagctgcataacgatcagttttattattcttggcactaagcaagaaattacatgcttgcaatggtgaataatacaatgcaaaggcattaggatcttgaccccgcttagtaaaccattgtggtgaaatgatcacaacagccttcttgtttctaagctgcttagctgttccttgcatccccaagaactgagccaaagattgactacccggtccacctaataagaatggacggtagtttctatgatacttttccgcaattacactagggtgaagtgggtcgaatcttgacaactcacttgaaccatagaatggcacgtagccatcttcaaaagcttcctgcttcattgtgctgcccttgaagacagttgtgttttgtgaagctgcagcctcgtaaatcgtttgcttagaaaaagttctttcccaaggaataaggaaaacaactaacaaaaggataaaagcgcaaagaactgggccaaagatttgccacagccggcgtttattactcattttctaagctttccacctttgccacaatcttgtttggagtgtcccattcttcacggttaaattctgaaacaggaacatcaatatcaaacttttcttgcaagttcaaaagcatttgtacacttgccattgagtccatcaaaccattgtcaaagatgttttcatccatttggtctgataaatcttcaccagttaagtcatttaaaatatctaatacgccttgttttgtatccataattaatacctctcaaaaaacaactcaatacttattctacttccagccgaaccacagttgacttaggaaccctgagaaaatcaagaaactgaaacatactacattgaaggttaagaaaatggcgaaccatttagtaaacttgttagatggaatttgcttcttatgctttctcttgaatctaagccacatatcgttgatacaaatagctgaagcatggaagataccataaacaatataataccacgttaagccatgccagaaacccatgattaagaacaacaggaagtaagaaacttgtgataatctaattcgattcttaaacattttcttcttcattgcaaagaaagtgaatcgcatgtagatgtaatcacggaaccagaatgataaagtaatgtgccaacggttccaaaaatccttaatgttcttagaaataaatggcttgttaaagttcattggtgtatgaattcccataaagtatgagattgatacagcaaacaatgagtaacctgcaaagtcaaagaacaggtacatactgtggcaatacatgtaagctacaagccaccatgatagcttcaagccgccatttgcattaccaacggctaaagcagcagcactgatctttggtaacaaataagtgccaaagaaccaaccaatcacaaatttgtataaaaagccttggaataagtatctaacagcatactgcatatctgtaatgtatgcatcacgcgtaggtaccttatcataatcttttttaaatctgcggtaacgatcaataggacctgacgaaatagttgggaagaaaagcaagaatcttgcgtaagtaacaggatctactttcttaattgccccatcacgcatttccataataacttgtactgtcttaaaggttacgtatgagattcccaagaaaccaatgacaaagccaattgagttatcaggaaaagcggtcaaatatttaactgcggctaatggaataattgccaaaatcacagccaaactaaagatccaagtcttatttttaccgtggtgacgataatactgataagcaaaggttaaggcaaattcgtaaaccaaccagattaataggttaaccccttgctcccagtgatcaccatcaaaaatcaagaacaagaaaacaattgaaaaaattgcttcatatgtcttgagtcgatgaccgtaatatagcccaatgataattggaattaaagcgatcatcaaatagatgaaatattgcggattagaataaggctgtaagttaatgaaattaaaattcactacttattaacctccttaattaccgccttaatatctaccttaccattttgtgaaataggtaatgcatcttggtagatgtaacgctgtggaatcatgtaaggcattatattcttagctaagtcttcacgaatcatcttagttaaagcagcttcagaatactgacgacgaacgccttcttttaattcgatttcggcaacgatctgcttaacagtgtggtccttattgtacttaggagcagcaacgccataacggacaagcttgttcttagttaagtagaaattgatttcttcaagttcgattctgtaaccattgaacttgatttggaagtcaattcgaccgcgataaaatagcatatcgccatcaaagaaaccagcatccccactccggtagctacgatactcagcaccatcttcatggaaaaaggcagcttcggtcttttcaggattgttcatatatcctttagaaacactaggaccactaatgataatttcaccttcgccaggcttatcacccttagaagtatcaattgtaatcttagtgtcttcttttaccttaccgattggcaaacggtcatactttttaagaacttcatcagtaatttcaacttgagtaacagcaactgttgtttcagttggaccataggtgttgaaaatatgactatctgggaacttcttcttaagcatctcagcttcactgtgtggcaattcttcaccacagaacaagaaatgacttaagtctggatggtgttctgcatcaaaagtcttgtccaagaagcacatctgtgcaaatgacggagttgatacccaaacattgaactgcatctttggcaaagtttggaataatttaccaaagttttgagtaacatcatgaggcaaaactaccaacttaccagcagaaacaagtgctggataaagactcattactgacaaatcaaatgagtaaggtgcttgtgccaagaaacttggatgttctggcaaattaaagtctgacaactcccagttaacgaaactaagcaaattgtcgtgactaatttgtacacccttaggtttaccagttgtacctgaagtaaagataatgtagtagttctcatcaccttcaacgaagttcttctcgtcaacttcaaaattgtcgtcttcaacttcgctagccttaagaaccttaacatcagttaaatcaacttctggtaacggatcaatttccaaaactagtggtgacttagaaacgtcttgaatcatcgttaaacgttctgcgttagaatagctagcaattggaatataagcgtgacctgacttaacacaaccaagaaaactagcaatcatttcaaaagtttgtccgccccaaatcataattggagcatgctctggaatatctaagctagcaattttatgtgcccacgcatttgaacgctttttaaggtcaccatatgtattagtttcaccgagatagtcgtaaacaacacgatctggttcgtttgcggcgatctcatcaattttcttaataacatcttgaatcatgtgatagcacctaccttaaaattcattataaatgaagtgaacagatgttagtccactatattcatataaatagataagagccatcaggattccgaaataaacaattgttttcaaaacaaacataccaatacgtctgcctcgagaatcaaccttcgtctttttattcattttttctcctttaggtaatcttacttttgcctttgccctatattactacaaatagtggcaacaaacgcactaacggcttatattttaacaaatttaaactttttcttaaatcttcagttatttgtttcaaattgcgaatgcgttttctttactgttgtctcttgcaatcccgataagcaaaaaataatggaataaagataactattgccacaaaaatcaaagcaaagatcattaagcgccatacattctgtggtttagtccacattttactctttgccgtcgccaacaaaaatgccgcaaataaagcaataacaattacttcaaccaggcaaaaaattaaatgagtattttgccagagatataagtaggttgttgccggaaataaacaaaaccaccctgaaaagcgtaaaagaaagatttcttttttacgataatctactttcattatagtttcctttcctcattaactgccaaataacgcattaatattcaccgacaaaatccggtccataactacaatttctggtctggcgtagatcttagagcctgattcaaacacacatagtagttgtcccttataagcggtaatttgctctaaatatggcggcatggtaattaccagttctgcattcttttcgtctaaagcatttaaagctgaagttggaaaaacgtagagcttggaatcaccactaccataagattggctcaaaaaaattttattttggtaaattgcaattccttgaatttgcttatccattgaagtttcgccagttggatcggaccattgcagcgttccggtaacagatttaacttcattattagtaattgagccacgatttttaccactacgcgctatagtgtaagccgcaacttttcctcgaccatacatgttaaaaaagccaacaaacaattgaccatcataatatgtaacggtcgatgctttttcaactgcaggaatggcaatttgatatttatacttaattggtatttggctgccctctttataggcccttaattctgccattgaaaatgctgctagcgctgaagatttgcccattgagccagttatccagatatttttggctactggatcataagcaatcccacctaggtgtggccgaccaggtatttgaatcgttttaagatatttgcctgtcttcttatctaagacataaacaaccgaagcatgctcatgttcaccatcataagcagttagcaaaatatacttacctgcaaccgtaatcccctgtggtgtcattgcagttgctgtattgacctttttagttttaaaatcataacttttagtagcaactaatcccggcaaaacaaagtcttttccatcccacgtccgcggtggtacataattggcaactttattaataaaaggatatttttcacgcaatgctttttggtaattggcaaaattatgccaagcaggactagtgcttgtcccatccttagcaattttttcttttggccgttgacggatcatctcctgcttctgccaccattggtaaccgaaatagcctcctgcaccaatccctgcaagcaaaagcagtactagcaggaagcgcaaaattcttttaccaatttttttcaaaaaattactcccttctgtttaggaattgtccctattatgcaattcattataacgaaaaaacaattactttttgtttttaactccttgctataagctttatttactaaaaagataaatttttttgcaaaaaagtgctttcgtcacacttttttcacaaattaaggttatactagtaaatgtagtgaggaagaataatcctctactacaactcaacttttttgtttttcattcatactcctccaagtaaataatgaaaataaaaagaattgacttactccaattagtcaatttcatatctatccctttcggctcacgtgcgttgcgtgagcttttcttataccttaacttattctcaagcaaatctttaccttttcataataaattgaacacttttacttcacatttacccagtattatataaaccgtagcaagatggtagaaacttgctacaatactcccacttttttatttcattcattcttactcctccaaagtagatgaaactaataaggtccgcaaaaacttgcgggccttttcctttttcagcacttttttctgtataattaaggtagaaatgaggtgccgctatgttttcaccatcaatcaaacatttaatagaagaaaaatctggttcatttttaatccctgctagccgaattgcctttgtccaagcagacaatcctctttatcatgcctttttgattttgactaaggttaaatattcaaaaattccagttttagataaagaaaaacgagtcgttggcctgcttagtttggaaatgattacggacaagatgctgacgactgatgagatctccactgcccctttagataaattaaaggtcgaagatgtaatgcaaactaagtttgataaaataaacttcgttgaaaccaccctagaaacgcaactgcatctgttaatcaataatgctttcttgcccgttgttgatgatcgcggcgtgtttcagggactacttactagacgcgaatggattaaggcatttaactatgtagttcacacttatgacaaacactacgaaacaaaacgaataaaataacctccaagcagcctttaaggctgctttttttaactccaacatttattgagcaaaaatgtgtccagaccaataaagaatgttagaattaagcggtagacagatatgtttgtatttgggggagggcaattatgaaaaatttaaaacgtcaatggaagtttattgtcgttttgattgctggtgcagttggattaattagccaatttgcattgcattcaaagagcctattctcaatcgggaatcttcaatttccagttcatgccatcattattgatatcattggtatcttgatggcaatttctttactattggaaattttccacgattggaagacaggccgttacggcgtagacatcctggctgttatcgctgttgtttctaccatattgattggtgatgtatgggctgaatggatgattttggtaatgatgaccggtggtgaaacgctggaagattacgcaactggtcaagccaacaaggaattacgtgccttgcttgataaaacgccacgtatcgccaacaagttagttgacgggaagatcaccgaagttaaggttgatgacctgcaggtcggtgatactgttttgatcaagccaggtcaacaagttcctgtcgatggtcaaatcgttaagggcacttcaagcttcgaccaatcttcattaactggtgaatcagttcctgtgaccaagaaccctggcgacgaattaatgtccggttcagtgaacggtgatgtagcggtagagatgaaggtaactaaggctgctaaggactcagaatatcagtctattgttgcgttagttaagtcttcacaagctcaacctgctaagttcgttaagatggctgaccgttacgccattccgtttaccgttatatctttaattattggtggtgtcgcttgggctgtgtctggggatgcaactcgctttgcggaagttatggttgttgcttctccatgtccactgttgatcgctgctcctgttgctttggtatcagggatgagttcaatgtcagctcaccatattattgttaagtctggtccaaccctagagaagttggctcgcgctaagacctttgcttttgataagactggtactttgactgaaaaccaattgatcgttgaccaagtcgttactgatgacaaatcatttgatcaaaaagaattgcaaagcttagctgccagtgttgaacaacagtcaagtcacgttatcgctagttctctagttaaggctactgacaaggatttaattcatcccgtaactaaccttaaggaaactaccgctcaaggtgttgaaggtgatgttgatggcaaacacgttaaagttggtaagttatcctttgttgcgccaggtcatgaaaaattaaacgtcacttcaactgctgtttacgtttcagttgacggtaagtttgctggttacatcactttgaaagataagatgcgtccagagagtcctaagactattgaacgtcttcgtcgtcaaggtgcagaagatatcatgatgcttaccggtgaccacaagcaagtcgcagaaaaggttgccaaagaagccggcattactgatgtccgctcagaacttttgccatcacaaaagattcaagctattaaagatgtgccaaagcacctacgtcctgtcgttataactggtgatggtgttaacgatgcacctagtctgaccgctgctgatgttggtattgctatgggtgctaagggtgctactgctgccagtgaaagtgccgatgctgttatcatggttaacgatatttctaaagttaacgatgcagtcgctatttctaaacacacaatgaaggttgctaatatcgatgttttaactgcaattggtgtcgttattatcattgaattgattgccttcactggtgttatcccagccttctggggcgctattttgcaagaagtagtcgacatgattacgatcagcttaggtttacttgctaagactaagccaagtgataagcaatttggtttggaagaaaaatagattagatgtgaagaagctccagaatcgatttggttctggagccttttttcatacataattatgcgtagcactgcaccagttcaatttgcatctaagttaaaaaactattaagattaaactcaactaaataatttttagtggttgggtttttatcacaataaaaactttcaagattcgcttctttgggtcaggaagcacttgaaagttttttgtttttttacagaaggggaaaatatgcattttttaggacaacttatcttaatcctcttaactacagttttgctggggcaattattcgcccgcttcaatatgcctgcagttattggacaactattatcaggaattttactgggaccagctatcttaaattgggttaagccaaatgatatcatcagtctattctccgagttcggggttattctgctgatgttcttagctgggcttgagagcgatctagatttattaaaaaaatacttcaagctaagctttactgtcgccacagtcggcgttatcctacccgttgttttcatgggcttagccagttacttctttggcatgcgccctcttgaagcactctttatcgggattgtctttgcagcaactagcgtttctatctccgttgtggtgctgcaagaagcacaccaactgcacacccgtgccggcacagccattttaggtgctgccgtagttgacgatatcttagccgtggttgttctgagtctattcactacattcagtcatgaaggtggcaagagcggcttaactaataactttttgcttaatatcttgattgaagtagtttacttcgtagttgtttggctgatttttaaatttgttgcgccatactttatgaaagcttctgaaaaaatcgacgttgactattccgtcgttatcggttcattggttttagccttaaccatggcttgggccgctgattttgttggtctttcagctgttgttggtgcatttttcggtggtttagcaattcgtcaaacaccacaatacaaagaagttcactcctctgtttccgcaatcggctactctgtcttcatccccgtcttcttcgctgatatcggtctttcaatgacttttgccagctttttcaaggatatctggttcattatcgttatgaccgttttagctattttatcaaaattctgggccggaaaatactccagcgaaatctttggcttcaataagaatgaaggcaatatcgtcggtgctggaatggtatcacgtggtgaagttgcactgattgtagcgcaaatcggaattaaccaccatctcttccctgaggatatttattcaagtctgatcctagtaattatcgttacaacagttatttcaccatttattttgaattactttattaaaaagagtcaaaatagtacggaatttatgtagaaaaagtctagcattcgctagattttttaatagtttaattttacaagtggcttatcataaacgcaattgtgtctacatggtaaaatcaatagtgagaggtgagaaatatgttacaaactccaaacaatattagagctgttaccgctcgtgacctgcgcaataattttaagaaaattgctgatgatattaatgactatgatactaccgttatagtagctcgtcccaaagataaaaatgttgtgattatttctcaaaaagaatatgattcatggcaagaaacttcatatcttctaggaactaaagctaaccgcgatgcattagctgaagctaaacaatcatttgaaaaccaagatcaacgaaataaagttttaaccccagaagaattcgaggctttaactaaagatgacgaagcttaaccttaattttaactacaatgcctggaatgaatatcttgaatggaaaaaagaggataagaagacttcccaaaagattgataattttattaaagaatgccaacgccatccttttactggaaaagggaaacctgagccattaaaagcgaatttaagtggtgcatggtctcgacaaagtaatcataaagatcgcatggtttattcagttaccacaacagaattacaaatatggcagttaaaataccattattccaaatgaaaaagctctttcgagcttttttgtttaacccaattttcctaaatcgattacttggtcatacttctgcaactcatttgattcatagtggtgaattacttcaataaaggtaaggtttgagtttaacaagtaattatgaatttgatctgatgtcttcttatcaagggatgcattaatttcatctagtagcaaaatcgatctatcggccaaaattgcccgtgctagttctattctagctagctgtcccccagacaattgatccgcattatcacccaaggaatagtcccagcccttttcagcaataatttgatccaaacctaatttttggcacacctcgctcaccttttcccgggaaatatttgcacctaaagttaaattaaaccacaaggtatcggcaaaaattactggggactggctagcataagcgaataaatctgtaaacgagcctggcttttgctttttgtcgttaagcaatatttccttggcatgaccatgctttccggttaataggaattgtaataacgttgatttacctacaccagatggtccaataactgcaactttttgaccttttacaactgcaaagttaatttgattacgcgtggtgctagttaaatcgttttagttaataaaaaagtccaatcttgttagactcgacttgtaaatagtaataatagaaaagagtctgatctgattgaactgccttaagcttaagcgttttagccaccatttacaagttagttttaaagatttagtgataatttgtcggcactggtatcgtttgtatgcaccggctgagtttactcatcggcgaaatattgatcaaattaaaactacggacagtctgattttggctttacttatctggcaagctaagacaggaattgaatcacaaagaagattctgtgaatgtttcaattgtttatcacactcacgttttaatcggcgttcacgtcagctattgcaattgatttatcagatacggcaagaaatgaataaaaaggttgacctgaatggacagttcttgatcattgacagctttccggtacctgtttgccaaccaattcgaaactatcgtgctaaaatttttcgcggttatgccaacattggttataaggccaccaagaaaatttacttctatggtttcaaagttcatgccattgttagcgatgacggttacattcttgattatgtcgtaacaaaggcatcagttcatgatgccagggagacagttgaactgatagaaaatacccatccatctaattactatcttcttggcgacgaaggctatttaggcaaagaactgcatcaacagctaaaacaaatgggttacgaactttggacaccatatcgtaaaaatatgacaggagctaaaaagcacaatgatcatcaattgatggctattcgcagaacaattgaaagcgacttttcgcttctgacctattacaatgccgagaacaatcgagcacgtagtctgataggctttcaaagccggttggaaattgcaattttagcttataatttggcttattgtctagaacgatttaactagcaccacgcgtatttgattagctaattccttgccttttctagtaagatccagatcttctatttgcaaatttgcaaaattataattggtctctttcttttcaaccttgcccttggcaatatatttttctgccttagcgacaattttcttagttgttgataatttgtttcgatcttctaaaatagtcaaaattggattaagaaatgaatttgacagttgaacgattgcaaataaggcacctaaagtagtttgacccttaaccaccatgtaaattcccactaagaatggggttaagaacgtaaataaactagcaatcaagttaatccaagaattagtatctagattgagtaagttcattttacgcaaagcatcttctaattgattgatcaaaacttgatttttcttaaccgcattatcgcgcttgttgtataaatttaatgttgtgctaccagccagaaagtttttaatatgactaacatatttatcattagcagttgtccaattttctgctgcagtttgaatcttcttttgaaataaattagaaaccagcatcggcaaacatgaaccgattaaaaataataatgtaactaaccaattaacacataaagcataccctagcgcaaaaacaatcatataggcctgcatcattatttcaatttcagcatcaaaacgattagtttccagcagcttaaaatctgtagtcaaaaagcctaagctagcagtattttcttcgctagtctgacccagcatcccctttaaaatgccagctcgcagcgtcgtattagtctcttgaatagcacttgtttttaaccgattgaaaatcagcgaagcaataaaagtcgcaataaacgccccaataacaataactagaaattgtgctaaatcgccaaaccttctttgcgtaccaacattggtcaatgtctgtaccatatatgcaaaaatgatttgttgtgtactagcaatcaagcctaaaatagttaacataatgaattttgcatgtgaagaatatttgtaaatcattttttgtcctcctgtattttacttgaggctagtatcgcaggataatgacgaaaaatgttagaaatttacagatctgcaaatcgaggtaaaacattatgttcaaatatggttcaatttacaaacaattgcgcaaagatcaagaaatcactcaaactgaagcctgcaagggtatttgttcaatctctaagttatcacgctgggaaaataatcaggtagaagttgagtttagcaccgccattgcattactcaggcgcatcaacattacgcttgacgaattcacgcattacgctgcaatgaaaacagaatttacattgccagacgacattataacggccattaaagacaatgatacaaaggtactcgaaaaatttgttcaggagcagctaaatcattatcacgccaacaaaaatattctcgaactcaaaaacatcattcttgtctgcaatcaattatttctcatgactggtaaaaactatctaacacctgcagacattaatcgaatcggttcatacctgcttcacaacaccgtttggtctaaatacaatatcttgctttttgctaactcaccgtttttgctaaattctaaaatcggctatcaaattgctctgcgaattattcacaattttcaccctacagaaagtttaaacgaaaatactactattttcatgggcggtttatctgatacagttattgccttagttttcaaaaagaagctagattacgctcaaaaaattcttaatgaattaaaaaagataggacttcccttctatctcatgttctttagttcaacattgacccttttacaaaaaattatcgactactgccacactctcaacgcacagcctgtattggcaatgattgatgccatagttcagctaaattgcatggaagttgctaaaaaatggcttgagatttttaaagacgtacaacaaatctggccagaaaaagaaaattaaaaaccgtaaaagtaatttactttcacggcttttgacatggtattcattatgcaagcttacaaatttttagcttttaattaatccttaacaacgtctttggtgttcaaccattgactcttgttgatcttaacgatcttcttgccagcagctttcttaacatccttagcggtgtaagttgaacccattgaaaccttttggctagtcttgtgaccttgtgcgtccaaaacattaactttttggttcttagtgtcctttacagcaacaaagatcttgtcaccctttttaattgcaggatcagttggcatagtttcggcaacacctaactttggagcagtaaaactagctgcttgactaactgaagcaccaacacccattaaactcattgaagcaactgcgattgaaacaactttaactaaattctttgaaactaacataatgaatacctctaatttctatatcacttaatttgttggaactttttgttccctcattccttacgtctttattgtataacatatgttattaattacaaggggtttatcgaattttttaaaaataattcagtcgtctcaaagtattgctataataacgattgcggggattttttgtccaaaagcattaaaaaagtgtctgagaaaccgttctttcccaaacacttttttaagcagctgctacttcgtttgaattttgagtcacttttctagtttttaaactgacaaaaatcgctacaattagtgttattacctggattactaataatgtaaccaaagcaacagtaacattgaatgaaccagaaattgtggttaatactgttgtcataattggagcaacagccattaagattgtatttaataagccaacagttgaagccaagattttatgatcaactgatgttactagccattgctccattttaactgaagcaactcctgcaatagctgccaagaaaaacattgttatcataattacgtaagtatttcctaggaaaatgcttgttgtagtaacaatacttaaactggcagaaataattactaaactaaaaactgttaattttttgaataattgtggtccaaacattgaacccaatgcaaagcctgcgccaataaccacaccaaacaaagcaatagtaaagctataagtgccgattagcatagttgaacgatgagctgcaagtacaattgttgtcaatggagtaattgtatctaaagctccatttaataatgcgattactaataccacagtcaataatcctgattgtttcttcacttgggtcaatgaagttttcattgtttggaaaaagttttgatcattaacttcctttttttcaagtggcttctgatccttctgatgttttaagccaacactggcaaataacaaacctgctaacaagaaagtacctgcattaacaaaggctaaagttgagtatgacattactagcaaaagtgctgaaccaatgaattgagcacccatactaataatttgatttacgccgccattaaagcctactgcattcccgtattcttttttaccaacaatatcaacaattaatggtgcaaccaagccacctgaatatgaaccaatagtatctgataagaaattcacaacaacgatgattaaaaccaaattccactgtgacattttagtgataaacaataatcctactaaaccatataagataaatcggacaaatgctgctaaaaagatattgcgaaactttttcttagtcttatcagcaaggtaaccaccaaagatctcgaataattttggaactgattcagaaattgcaattaatgaaagtgctaatgagtagttttgtaatttgctagcataagtcatgaaagccaagtagaaaagaatatcgcctgcgcctgaaagaaaactagctactgaaaatcttctaaagtctgcgtttttaagaaatacgttcataaatcttacccctttttctttgtttcgtttgttgttgaaattataataaagtgaaaaagaaattaattttaaaaatggcgtattcgacattcggaggataaacctatgacaattggtgaattactcaaagaaaaaagactagcagaaaacaaaactcaaaaagcatgggttggtcatattatcagtacttcttattatgctaaagttgaaaagaatattcatagaattacagcagaggatttattagccattcttaaacataatgatctttcaattactgactttttcgaagaattagcagacaaaaaggatgaactaaaagcacaagtaaactcgctaaataaaacagtaattgatgctgtttgtcattctgatgtttccaaagttaatgaagtcattcaaattattaaaaaaatggatctaccgactaagcaaaaacaagaacttatcttaatcaataaggggtttatcgaaactatcaaaaatgatctaagtgacaattatcagccagataaaaacatcgttcaacaactaaaagacaaaatttttagtattcctaattttaatagattcaaacttgaactctatactaatttcatgcaattttatgattatacaactaatattatgatcaccaaacaagtgatccataaaatagatcagtttaagagcgataaagagttattagcaatcgctggtattctattcaatctcctttcacaattagtcgaagaacatcattatcaagaaactgcaccatttatagcagctagtgagcatttaccctttttaccagacttatactttcctcaaaccggaatctcattgctaaaataccttattagttatcattttaataaaaaaacagcagacttagctaaagctgagatgattgcacaaacttatcaaattactggtctagaagactttggtaaaggtgcacaagaaattattaatgaagttaaagaggactagctttaagctaatcctcttgtttcaatctctaaataaaacctaacgcgttatagcacatgtgcaccaaaattgaatagcgcaaatctttggttgacatatagacccaagctaaaaccatgcctaagacccaatatactaagatatacttacttaatgccggatcatgcatatagccaaataaaaatccgcttgcaacaatacctagccacttatttctagtatttttcttagtgaaaaagatattgaaaaacatccctctaaagatatgttcctcacaaaatggcgcgatgaaaactactaggatcctaaataaacctgcattgtattccgctattttattcaagctttcctggttctttgaaacgccgccaccaactagattaagcatcacaatcgaacctactacaatcagtacaaaaccgatcatcgctattccgattctgcgccagtcccagtgtggtgtttcatcaaagccccaatcattttcttcttttaattgcctgcgataaatataggaaattgcaaacaaaactattaccgtagcaagcgccgtaacgaagacgcgatattgcgccaaatcaaatcgctgaggtctaaagtaaagtacttctaattcagaatacattaccaaagccaacacagcccctgcaatatttcccaggtaatgtccaaatctcttcatttttcattcacaccttgattctttcaactagtaatcattgtttctattataatgtaaataagaaaaaatacctaaggaggagtatctatctatgcttaatcagatcatcgcttttttggggagacgcggtgagttcttctacatttcagtctttatgttactgatattttttgcctttttaatctcttggcttatcgaaccaagacgtttgattaatggcgttttgtttactatctttatagtctcaatgctctcttggatcaccgttatggtgcacaaaagtacgagtcacggcttgcaacgtgcctatgacctactagttctagctgcattatttggcattgtcttattattaattttcgcctggatttttctattctggaatgcctatttcgtttggaaatatgaaagccatactttgcctaacttgcttactttaattaccggatttttagcattaattattagtattatcgtgctcttaggaccaggtaagtacttgccacgttggcttagtctcgcattagcttcaattcccgcgattgcaatttatttgggattggtgctttacaactttttggtaaacttgcttctatatcaaatttatcctcgtacctaccaccaagactatttaatcgttctagggtctgggctaatcaatggcgaccaagtatcaaaactgcttgcggctagaattaatcgggcaattcaatactctaaccgccagtatcaaaagggccgcaagcgccctatcctgatcatgtcaggtggtcaaggcgctgacgaaaaaatctctgaagcactcgctatgtctcgttttgcacaacggcgtggcgttagtgttgaccgtatcttattagaagatcaatcgaaaaacacatacgaaaacatgctcttttctaagcgtattgccacaaaagattttggtaattcccacttcagggcacgcttctttagcaataattaccatatttttagagctgctctcttggctaaggaagttggtttaaaagccaatggtgtcggtgcttacaccagattctactacttgcctaacgcaattatccgcgaatttgccggtgtgtttgtcatgcataaacgccgtcatttcgttatcatgggattaatcgttttattctttatcctgcaagctatcttagtcatgacaggattataaagatttactgtaatttagaaaagagggatgcaatgcttcaactaaagcatatttttaagtcatataaggtgggggacaacatcacccacgctttagacgacgttacaatctcgttccgtgaccaggaattcgtcgctatcttaggtcctagtggttctggaaaaactaccatgttaaacgtaattggcggacttgaccgttacgaccaaggtgacttgatcatcaacggcaaatctaccaagaattttaaagagaccgactgggatgcttaccgcaacaataccgttggttttgtttttcaaaattataatctaatcccccacttgtcgatcatcgccaatgtggaactagggatgaatttgtctggtgtgcctaaaaaacagcgccatgaaaaagcaattgcggcgttaacagaagtgggattgaaagaccatctaaataaacgtcctaaccagttgtctggcggtcagatgcaacgagtagcgattgcgcgagcaattgccaacgaccctgatattctactttgtgatgaaccaactggtgcacttgatactgagacttctgtccaaattatgaagttgatcaaaaaactatctaaagatcgactcgttattatggtgacccacaatcctgaattagctaaagaatacgccacaagaatcgttaatttccaagacggtaagattcgtcatgattctgatccttttagccctaataaggaagaagacaaatttaacctcaagcgtaccaagatgtcttactggaacgccatcaagttgagtttcaccaatattatgacaaaaaaaggtcgaactctgctaactgcttttgcttcaagcatcgggattatctcaattgccgtagttttagctatctctaatggttttcaaaagcaaatcaataccacaatgagcaaagctttagcaaaatatccgatttctatttcacagaccgcaactgacattacttcagctaatgcacgtaaagaatcggataaaaatgtcaaaaaccgcggctatgtaacggcagaacaagaccaaagcgaacaggcccaacacgttaataaaattagcacaaagtatgttaactacatcaagaagatcaatcataattatgccaataacgtgtcttaccaacgcggcgtaagcttgaatttattagctaaaaacaagggaaaaattgaacgcgtgcaattttcaaatacggatcctgatcagactaattctgttctagctgctagatcccaagcgatgagttcaatgggactgggttcaagtgtctttcccactactttaaataaagagaaagactcatttttgaagcaaaactatcaattgctctcaggcacttggcctactaaggcaaccgacttggttttagttactgacaataaaaatactgttaacatcaatgccttaaaaaatcttggtttcgatttaaagaataaggaacacgtcaaattcggccaattagtaaataagcaatttcgtgtagttgctaacaatgattactatcagcaattgccaactggcatgtttattcctaaaaaggtaaataacgccatgtataacggtgctcaaaccaagctaaagattgctggtgtcattcgtcctaaaaacgaagattcaatggccttgttatcaactggaattgcttatagcgatcaactttcacaacgcgtgattaatgaaaataaaaactctgcaattgtaaaggcacaaaagaagagtaaccatagcgtattaactaaccaaaaactaaatgccaatgaaaagaaagctacaatgcagactcttggcggtaccagcatccctactggtatcatgatttatcccaacaattttgatgataaagataaagtacttgattatcttgacaaatggaacaaggggaagaaaaaatcagacaagattctctatactgacatgtcaaacgctgttaccacaatgactggcggcctcttaagcgggataacgaccatccttgtcgcatttgctggtatttcattaatcacatctatgattatgattggtattttaacttatacctcagtacttgagcgaactaaagaaatcggggtactcaaggcattaggtgcccgtaaaaaagacattactcgtgtctttgatgccgaaaccttcatcctaggtgttttctctggtgtattaggcattctgattgcttacctactaacatttccaattaacagtatcatttacaagattactgatctggcaaatgtagcccaactagatcctactgctgctattgttttgatcattatttcaactatcctcaccctcttaggtggtcatattccagcacgaatggctgcaaagaaagatgctgcaattgcattgcggagtgaatgaatttaataaagaatttgttacgttgttcacaataacctaaatttttagcaaaatatgtggtatcttagctttagcaaaaacaagtaagaaaggaacttttttcaccatgactgttaaaaaattagaaaataacagcgatgttaatgtagtggcagaagaaagcaaagttttaactgatttattgaatgaatcaactaagcaagtaatcggtcaagcagctttcgataagatccaaaacttaattaaaatctctgccgccaaagattatcaagaacttgaaaagcaaattgctagtcttaacaatcgcgaaatgattgttgttgcacgttattttgctactctcccactcttgatcaacatttcagaggatgtagaactagcaagtaaagttaatgtgcttaacaatactcatcaagattatctaggtaaattgagtgacacaattgacattgtagcccaaaagaaaaatgccgaagaaatccttgaacatgtaaatgtagtacccgttttaactgcccatcctactcaggtacaaagaaaaaccattttggaattaaccgatcaaattcatcaacttttgcgcaattatcgtgatgtgaagaatggcacaattgatcgcgatgaatggactgaacaaatgcgggcttgcattgaaattttgatgcaaactgacattattcgtggtcacaaattaaaggtagctaatgaaattaccaatgttttggcttactaccctaaggctttaatccctgcaatcaccaaatttactagtcgttacaaggaattagctaaaaaacacgggctaaacgctagtcatgctacgccaattaccatgggaatgtggatcggcggcgaccgtgacggtaacccttatgtaacggctgatacgctagaactaagcgctactttgcaaagccaagtaatctttgaatattacattaagcaaatcaataagctttatagagccatttccatgtctacttcttatatggagccatctgacgatgtaatgcacctatctgagctttctaatgatgattcaccattcagaactaacgagccatatagacgggcattctactatattcaaagccgtttagtgcacactgaacaaaaattactgaatattactaacaagaacactttcttaaagaaacgtgacctccaaaatcttgataaaatcccttgttatcaaaatgctcaagaatttaaagccgacttagaaatcatcaaaaattcacttgaagaagaccatgatcacgccgtagtagacagctactttactcaaattcttgaggctatcaacatcttcggcttccatctagctacaattgatatgcgtcaagattctagcgttaacgaggcctgtgtcgctgagctacttaagagtgctggaatttgtgacaattatagcgatttaagcgaagacaaaaagatcaagcttttactcaacgaattgaacaatgatccacgtaacttacacgccaataacaaacccaagtctgagttactacaaaaagaattaaagatctacaagactgctcgtcaattgaaagaccgtttgggtgaagacgtcatcaagcaacatattatttctcacactgagagtgtttcagacatgctagaacaagcaatcatgttaaaggaatacgatttacttgataatcaaaaagcccgaattcaagtggtaccactatttgaaacggttgaagacttgaataatgcccgggaaataattaaggaattcttaagctttgatatcgtcaagaagtggcttgtttctcaaaataattatcaagaagttatgttaggctactcagattccaataaggacggtggctacttagcttcatgctggaacctttataaagctcaaaaggatctaactaagattggtgaagaaatgggtatcaagattacctttatgcatggccgtggcggtaccgttggtcgtggtggtggtccatcatacgaagcaattacagcacagccattcaagtcaattaacgatcggatgcggatgaccgagcaaggtgaaattatccaaaacaagtatggtaataaagacaccgcctactacaacctagaaatgttagcttcagcaacaatcgatcgaatggcttctaagcaaattgttagcgaagatcatgtcgcagatttccgttcttcaatggatcaaatcgtagctaaaagcaacgaagtttaccggaaactagtatttgagaatcctaacttccttaagtacttcttccaagcaactccaatcaaagaaatctctggtcttaacgtaggttcacgtccagcttcaagaaagaaactcactgacttttctggcttaagagccatcccttgggttttctcttggtcacaaagccgtgtaatgttccctggttggtatggcgtaggttctggtttcaagtcatttatcgatgctgatccagccaacttgaaggaattacaaaatatgtaccaaggttggccattcttccactccctgctttccaatgttgatatggttttatctaaatcaaatatgagaattgccaagcagtatgcggatctttgcgaagatgaacaagttaaatcagtctttgatatcatcaatcaagaatgggaactaactaagaaagtcatcctacaaattgaaggtcatgatgaattaatcgaagatgcacctactcttaagaagagtctggaatacagaatgccttacttcaacattttgaactacatccaattagaaatgatcaagcgtgatcgtgaagatgagattcaaggtgtttaccaaagtattattccaattactatcaacggtgtggcttccggtttacgtaattcaggataaaaaacacataaaattcagctaaaaaaggctcctcattgcctgttttatcaagcatttgaggagcttttttttaatttattaaactttttagttacgcctttttcataactaagttaagtggcgttacaattactggaacgacaatggctgtaaaaattgcttctactaaaccgttcatgcccagtgccataattaaaattaaaatcaatggcgtacctgaactataatttcctaggtaatgagttaagcttgctggatcatgcatgaagaaaatactcgtcagcaaaataaccatcacggtattagttaacgaagtgactgctccacttatgatataacccaatttcgcatatttagtcttactcatacccttcgcaataattcccgggaaatagccagccaaaatacttggtaccaatgaaattaccggattttggaacaacattaagctgaccatatcgccaggttgagtatatgcaacaatcaatctggtaataccccagaataagccaaagcctagacccgccttttgtcccattaacgtgccatagacggcaattgtcattggaatagtagttacagctggcaaagccgggataattcttacatagccaacatttggcacaaaagtctgtacaatcaataaagcagcaaagacagcagtaattgctaatcttttagtttcttctcttctcatatatttctccaacttaattctttagactcaattaaaccataattaagattttttctcagcaaaaaagtttattatacaatatctaggtatattttatctaatatgacaagatattgtattttttattatttttttacttaattatgcattatccttactctctctaatgcataatcgtgttctataccaattaagaatccctttatatcaatactttatgttgtatgtcaattttgacatagccactaaatattgttaatctcgttttgtgttaaaaatcatttgatggagagaggatcaattttatgaataaaaaagtcaaaaaattactatctattggtgtgcttgcattgagtttaggtgcaattttaaccgcctgctctggtaaaaaacagggtgcaagcaataataaatcaagcgatgccaagcactctattgcattaattgctgacggtaatggtgtaaatgataactcttttaaccaatctgcttgggaaggatttcaaagttatggcaaagagcacaacttgagccgcggtcgaaacggttatcaatattttcaatcaagtagtgctgctgatttcactcctaattttgatcaggcagctaaagctggttatcaaactatctttggcgttggttacagtttaaaagatgccgtagcttctgccgccaaacgctatcctaaaaagaattttgccattattgacgatgtaatcaaaggacaaaagaatgttgtctcagctaatttcaagagcgaacaagcttcctacttggctggtgtcgtagctgctaaagaaaccaaaaccaacacggttggcttcatcggcggtgctcatggcgatattgtcgacctttttgatgccggatttactcaaggtgttaaagatcaagccaaaaaaatgcacaaaaaagttactatcttaaaccaatatattggcaactttactagttcagacaaggccaaatcaattgctcaatcaatgtacaccaaaaaagccgacatcatcttccatgctgctggtggtgctggtgatggtcttttccaagaagctaaagccattaatcaaactagaccagctaaagataaagtgtgggtaatcggagttgatgtcgatcaatctcatctcggtaactacactgctaaaggcggacaaaaatctaattttgttttgacatcagtaataactggagtaaatgttgctgttaaagatatcgccaatagagcttataataataaattccctggtggtaaaaatttagtttatgggcttaaaaacaatggtgtttctattgaacgaggacagatttcagcttcaacttggaaagatgcccaaattgctagagctaatatcctaaaaggcaaaattaaggttgccattcatcctaacaataaataaaagcatactagtatagtttgctttttataattacaatcaattattttttgcctgatcaatatttttgttgacaaaataccaaacaattaataaacttatttataaattgttcggtattaatattgtggaggacagaaataatgaacgtaaagttcaagaaaattttatcatttggtgtcgttttagcatcagttggcttgattctaactgcttgttcgggtaaaaagtctggtcaatcagccaacaaagatactaaacatggcattgccctaatcacagatgaaaatggtgttgatgatcattcatttaaccaagctgcatggtcaggatttaaagcatacggcaaggaacatggtttaaaacaaggaaaaggtggttatcaatacttccagtctagcagtgccgcagacttcactcctaactttgatcaagccgctacagccggctaccaaaccattttcggtgttggctatcaattagccgacgcagtcaagcaagcagccaagaagaatcctaaaaagaatttcgttatcattgatagcgttgactctgggattaagaacgtcgcttctgcaacctttgaaagcaatcaagcttcttatcttggcggattggccgcagcttacaccactaaaaccaacaaagtaggtttcattggcggtgctaagtcatctattattgatttattcgaagccggttttaagcaaggtgttgctgacggtgctaaagctcttcacaagaagatttcagttcaaacccaatacatcggtaacttcacttcaaccgataaggctaaatcaatcgctcaatcaatgtatgctaaccgcgctgatattatttaccaagcagccggtaacgcaggtaacggtgttttccaagaaggaaaagattacaaccaagcccgtccagcagctaaaaaggtttgggtaatcggagttgacgttgaccaatctaacctaggtaactacaagtcaaaagatggtaagaaagagaacttcactttaacttccgtcttaaagggcttagatgttgctactaagtcaattgctaatgatgcttacaatggtaaattccctggtggtaagcacttagtttacagcttaaagggtaatggggtttaaatcaccaaaggtaatttaaacgctaaaacttgggcagcagtacaaaaggctcgtcaacaaattattgatggcaagatcaaggttgctactgctccaactaagtaattcagctgcttagtattttgagaactcttcgttttttagcgaagagtttttctatagttaattaaggaagtatttatttacatgaaagaacagagaaataaagtaatcgagatgcgtcatattgtcaaagatttcgatggtttcaaggcaaatgacgatattaaccttacgctctatcaaggtgaaattttcgctttgcttggtgaaaatggcgcgggtaaatctaccttaatgagaattttatccggcttgcttgaaccaacaagcggtgaaattctggttaataatcaaaaagtaaatattaaagatccaaccgtcgctaaaaagttaggcattgggatggtacaccagcacttcatgcttatggattcatttaccgttttagaaaatattattctaggacatgaatcaactaagggacccgttatcgatctgaaaaaggcaagaaaacaggtcctagctcttgcacaaaaatatggctttgctattaatccagatgccaaaatctctagcattactgtcgcccaacagcaaagagttgaaattctaaaggtactttatcgtggtgcagatattttaatttttgatgaaccaactgctgttttaaccccacaagaaatttctgaatttattaaagtactcaaaaatttagctaaagaaggcaaatcaatcattttgatcactcataaattagaagaaatcaaggctgttgcagatcgagttacagttatcagacgtggtcacgatgttggtacttttgctgttgatcaagttagtgatgaacgattagccgaattaatggtggggcggcatgtcaacatgaaactaaccaaaccagcacctaacttgggtaagcaaattttggcaattaaaaacttacaggtaaaaggaaatcacggtgccttaagcgttaaagacctttccctttcaattcgtggaggcgaaattttagggctagccggaattgacggcaatggacaagatgaactggttgaagcaatcactggtttacgccatgttaagtcagggcaaattttaattaatggtcaaaatttaaccaaccaaaaagttcgcaaaatcaccgaagctggcgtagcgcatattcctgcagaccggcaaaaatatggcttaattcttcacatgtcattagctgataacttagcgctgcaaacttactaccaacgtcccttctctaatcatggcatcattaatcatcaagcaattttgaagcatgccgtagatttaattaaaaaattcgatattcgaactactagccctgcattgccagctagcgacttatcgggaggcaaccagcaaaaagcaattatcgctagagaattaaatagaaacagcgatctaatcattgcattccagcccactcgcggtttagatgttggtgcaattgagtatattcataagcagcttttagctcaaagagcagcaggaaaagctatcctattaatttcatatgaacttgatgaaattatgcaattatctgaccggattgctgttttgcatgatggtcaaatttcaggcgaagtattacctgaaaaaactacagatcaagaactaggtcttttaatgaccggtgttaagaaagaagatgcaacaattgattaaagttacacctaaagtcaaaaatattctagtaccagttatctcagtaattgctggttttatagttggtgcaattatcatgctgatttggagttataatccttttcaagcatacagctccatgttctctagcgcactgggcaatatgaatggtattggtgaaactattcgtgaagctacgccattaatttttattgctatcggttttgcaattgcctcaaaagctggcttttttaacatcggtttgccaggtcaagcacaagctggttggttgacttctatttggattgtattggccaatcctcaattgcctaagccagtattattgcctttagctattattgcaggcgctatagctggtgctattgtggcaggaattgctggctatttaagagctcaatttggaactaatgaagtaattactactatcatgcttaactatattgtgctctatacttgtcaatatttaatgcaacaagtaatgtcctcaaaattaagaattgataccgatactaccaaaacaattccagccaatggcagcttaaagcttaactggttaactagcatgtttggtgattcgcgaatcaatgctggtattttcttagcaataattggacttattttttattggtatttaatgaaaaaaactaccgttggttttgaaatcaaggcagttggactcaatccttttgctagtcgctatgccgggatgtcttctaaaaagaatattattatttcaatgttactttcaggtgcattttctggcttaggcggtgtagtacaaggacttggtacctaccaaaactacttcactcaaacaactagtttggatattggctgggacgggctttcagttgccttacttggtggtggaactgcaattggtattttattagcttcacttcttttctcaattttaaaaattggtggtttgggcatgcaaactattgccggtattccttatgaaatcgtatctatcgtaattgctgccatcattttcttcatcgctatcaattatgtcattggtttgctttttaaaactaagaagaaccgcagtgattactacattccaaccagaaaagaaaaaagacccaacaatggtgttgatggtccaggtagaaaagtaatcgaaggagaaaaataatgaatttcgttacaatgatggcgttaattgtttcatccactttagtttattctgcgcctctaatcctagcttctcttggtggtgtttacagtgaaaactctgggattgttaatattggcctggagggtatcatgaccatgggagcctttgcggcgattgtcttcaacctaactttcgcttcaacttttggtgcagctactccttggcttggcactctagtcggcggaattgttggtttgattttttcattgcttcacgctgttgccacaatcaattttcacgctgatcatgtcatttccggaacagtgctgaacatcatggcaccacctttgggtgttttcttgatcaaggcaatttatgataaaggccaaactgaaaatatcaccgctaacttcggctacttcagctttcctggtttaagcagcattcccatcgttgggccaatcttcttcaaaaacacctctgcccctgcttggattgccattattcttgctattttgatgtggtggattttatataagactcgctttggcctacgcttacgttcatgtggtgaaaatcctcaagcagctgacacaatgggaatcaatgtctatggcatgcgttatgcaggtgtattaatttccggctttatggcaggtcttggcggtgccgtctttgctcaagcaatatctggtaacttctctgtttctactatcgttggacaaggattcatggctttagctgccgttatatttggtaaatggaatccaatcggtgcaatgctctcatcccttttctttggttttgctcaaagcttaagtattattggacatcaactgccaggaatcgatcaaattccatccgtttacatgcagattgcaccttacgttattacaatcatcgttttggtcctcttcctcggcaagtcagttgcacctgccgcagatggggttaactacatcaaatcgaaataagaaaaaaaggttgtttcacatgaaacagccttttttttacacatgtccacatagttatccacaagatatagtgattatatgtggcaatcttactatatcttgtactaaataacagccaacggcgttttatcagttggcattggaaaatcactgttaagcaatctaagctcatcatctgtaagtttaatcttttgtgttgcaatattttccttcatgtgttctacactacttgccttaggaatcgttaaaacattgccattgcgcatcgtccaagctagcattatctgatgaggcgtaacgccatgatcacgtgcaacaattttcaaattacgcgtaattcgaattgtgttgcccttgcctgaattaaatggtgaatacccaataaagtttacaccgtgctcttcttgccaagcttgcagatcaaattctgtcccacgttcactgatattgtataagtcttcattagcaaagcattcttctccacctggcactgtaaaaagctcctacatatcagccgtatcaaagttagatacaccccaataacggatcaagccatctttttgtaatgcttgtaagccgcggatcgtatcagacaagcgatgactgccccgccagtgtaatagataaagatccagatgatctgttccaagacgttttagactggcttctagactctgacgttctagttttggcgttgcatgataggggtagaattttgaaatcaaaaataatttttcgcgatcatatcctttaatcgcttcaccaattagctcttcgctttggtcatccccatacatttcggctgtatcaaatacactcaagccatgatcaaggccatagcgaatagctgctatttcatcttttttctttttaggatcttcacccaaaccccagctaccaattcctaaacctgttagtttttcaaaattcatcctcgttcacttccttatgttcaaattttaacataattgattcgtaattatttttatcaatcaattgacaaaatggtctattccattttataatggactagaccagcaaatgaggaggacttaattatgaaagttattgttaccgaaaataaaattcaaggtggagcaaaagcatttgaaatttttgaaaaaggaatcaagaacggtgctaaagtcttaggtttggcaaccggctcaacccctgaaacactttaccaaaactgggtaaaaagcgatcttaactgtgaaaatcttaccagcattaacctcgatgaatacgttggtttaaccccagataatcctcaaagctaccactacttcatgcaaaagcatttatttgacaagaagccatttaagaagacttacgttcctgacggtatggcaaaagacgttgatgctttttgtaaagaatatgatcaaattatcaaagacaatcctatcgacattcaactattaggaatcggccgcaatggtcacattgcctttaacgaaccaggcactccattcaacatcggcactcatgaagttaagttaaccgaaaatactatcaaggctaatgctcgcttctttgacagtatcgatgaagtgccaaagagtgccatctgcatgggtactgctaatattatgcaatctaagaagattgttttgatggcttttggtgaaaagaaagctcacgcaatcaagaaaatgattgaaggcaaagtcactgaagaagtacctgcatcaattttgcaaaaacacccagatgtaacggtgatcgtagacgaggctgccgcacaagaattagacgacaaatacaagaactaaaaacaataatttaattatcagcatagaaaaagctaggctttctacaatcgtggaagacctagtttttttatttagcagcctgtatctacaatgaaatatacttcacaaaattgcatttttatataaaaaatgaagcataattcagttttttattgaattatgtttcattcctattcgattttttatttctacccttgacttttagatgtgaaacataatcaaaaaatcacttgtgtgccacaacatatcgtattaaacttaataattgtctacatatggtatttaagaaagaatgtgattcaagttattgttttaagtgggccaattggagccggtaaatccagtttaaccagtattctagctgaacatttagggactcaggcattctatgagggcgttgataacaatcccgtattgcctttatactacaaggacatgaagcgttacacttttttgcttaacacttacctccttaaccaccgtttagcacagatcaatcaagcaattcaagaaaaaaacagtgtctccgatcgttctatctatgaagatgcactgttcttcaagatgaacgccgatagcaaggtcgctgatccaaccgagttcaagatctacgatgacttactcgacaacatgatggaagacactcctggcaatccaagtaagaagcctgacttactgatttacattcatgtctcccttgatactatgcttaaccgaatcaagaagcgcggtcgttcatttgagcaaatcagcactgatccaggtttgaaagattattacgcaagacttttaaagtactacgaaccatggtatgaaaattatcatgcctcaccaaagatagaaatcaatggcgacaaacttgattttgttaccaacatggatgcacaaaaagaagtacttaaagaaattgatgaaaagttgcatgaaatcggcaacttataagaaaaagaaggaacgtgatgacagttattgttttaagcgggccaattggagccggtaaatccagtttaacaggtattttatctaaatatttagggactaagcctttctatgaaagtgttgatgacaatccagttttgccacttttttacgctgaccctaaaaaatatgcattcttattgcaagtatatttcttgaacacacgcttccacagcattaaagacgcgctcactgaagataataacgtcttagatcgttctatctatgaagacgccttattcttccaaatgaacgctgatatcggccgtgctacttctgaagaagtcgatacttactatgagttattgcacaatatgatgggcgagttagaacggatgccaaagaagaatcctgatttgctggttcatattaatgtttcatatgatacgatgatcaaacgaattcaaaaacgtggtcgtccctatgaacagttaagttatgattcaactttagaggactattacaagcgtctgcttcgttattacaagccttggtatgagaactacgattactcacctaaaatggaaattgacggtgataaattagacttcatggctaatccagatgataaagaaaaagttttggatcaaattacagccaaactaaaagagatgggcaaattacctgaagattgggaaaagcctaccgatattcaaattgaagcataataaaaaccattcatttgcgaaattatcgtatttgaatgattttttgtttacagtgaatttttcgctttatttttgtataatttgaaaaaatgtgtttaaaggaggagtttgaaaatgatgttaaccgtaactggtggacaatggtttttcccacttgtcataatttgtctaattttgggtattgtcgcaaccatcgctcaaaagaaaaagctgactaaactaaaaagaataaccgataactttgcctatgcaatattagttattctcttaatcattgaatggattctatattttcaaaaacaatttaattttattactccagcaatctacacccttgttgtcatctatcttattggacggcaattactaatcagataccgttcttctctattgaaaaaattaggggctaaatataagcaactgacaattggacttgctactatttacattattttagttaccttattgcttttaatcggatctaaattttcaactatgggctggatcattgctggattagttatcgtagcctttggcttcgttagctacatctttgaaaaagacaaacaataatttcccaggaaataataaatcgcatagagcttctatgcgatttttatttattcaatttttgctaatgccttcgcaaccccatcatgattgttatcagcagtaatttgttccggagcaaatttttgttttagttctgctggggcattacccattaaaaatggataccccacttcttccaacatatcttcatcgttatagttatcgccaaaagcaatgcaattttgcaagtctacgccatattcttgagcaactattttgactgcactagccttgcttacaccctttaaaacaatttctaataaattctctgctgatctaacaaaagtcaaatcaggatatttagcagttaattcttcttgcatacgatcaagatccgctgaatctcccataattagacctttatgcacgccctgcagtttttcaagttgattaattgtagtcggtgttgcttttacatcgacaattctttcttcatttttaacccgtgggctcttttcttcactacaacaccaaacatagccactatagatattccaagctgcatcattatcttgctcatcaaggtagcggcaaatttcagctgcttcttttgcattaaaaaaacggctgattagtactttgcctgtttcatcaagggctaaagcaccgttatacgcgataaacggacaaactttcaaaatttgattaaccactgtcatcatccctttaggaagacgtgctgatgcaggaacgaaaatattaccattaataatttgtctacgaattgcatcccgcgttgcggcggttacctttaaatcatcattaattaatgtaccatcaagatctgaaaaaataagttgtgcggacattctttcacctttatttcttttttaattcttatatcctaggataatgctttatttatgctaatgaaagctgattcaattaaatgcttttcctatcatttaaagataaattgcaataaatgcccaagtaatcattaaaataattcgcgtttacaaatttatttatcaatgctaaagtataagagttgtgttcaataagttaaaacacgaacaatattttggggagataaaatgaattttataaaaagctactttcaattagataagtacaaaaccaacattcgaactgaatttattgctggtttaactacctttatcagcatgtcctatattttgtttgttaaccctagcgtactgggcgccagcggtatgaataccggtgcagtcttcaccgctactgctttagctgccgctcttggtactgcaatcatggggatcgttgccaactacccgatcggtgaggcaccagctttgggaatcaatgccttctttgcttacaccgtatgtattgggatgcatgtttcatgggaaacagccttggcttcagttttcgttgcatcaattattttcatcttaattactttattcaaattaagagaaaagatcattgattcaattccagctgacttaaagtttgccatttcttctgggatcggcttattcattgcctttttaggtttacaaaatggtaaattgatcgttgctaataaatcaactttggtaggtttaggatcattacacgatcccctcgtttggatcactatctttggtttgctagtaactgtcattttgatgatcttgaacgttcctggtgcaatctttatcggaatggttcttgccgctatcttcgggatctgcactgggcaaattgcattgccacacaaggtgatttctaccgcacctagcttagctccaacctttggtcaagctattttccacgtaaaggacatcaactctgtgcaaatgtgggttgttgtcttaacattcctgcttgttactttcttcgatactgcaggtaccttaatcggacttgctcaacaagctggtttcatgaagaacaacaagatgccacgtgtaggtaaggccttagcagctgactcaagtgcgatggctgttggttcaatccttggtacttcacctgttggtgccttcgttgaatcaagtgctggtatcgccgttggtggccgtaccggtttaaccgcagtttttgtagcgatctttttcttaatctcaatgattttcagtccattgcttggtgttttcactagccaagttactgctcctgccttaatcattgttggagtattaatggcacaaaatactgctcatattcattggaacaagttggaaattgcagttcctgcattcttgattattttagggatgcctcttacttactcaatttcagacggtttatcatggggcatgatcacctaccctatctgtatgcttgctgctaagcgtggcaaggaagtcacaccgatgatgtgggtactgtttgtagtattcctgatcttcctgtgggtactgaacttttagatgaaaaagaatagataaagaaaaggactaagttcgaatttgaacttggtcctttttgtgtattcactaacattactttttattcttatcgattataatcgataaaaacgtcaaaatcaccaatcttatcgagtataatcgataagatcgcaaaaaaagagtcttttatcgactatactcgataaaggctcttttttatattacccaggaaatattaacgtacagtttctaaacaatatgattttttataataaaatgcgtcataacaggcgaattttaattggctttaaaatttcttttttataaaaacaagatagcctaaaagggtaaaaagaactatatagcacaatgtaccaattaataattgtggattagagagatgggaggttaagtgataagttgcataattataatactgtgtcgttaaattgagcatattcaaaggattccaacgaataatatcaagcggtccaatattataatttaataaattagatgatagactgcttcccataaagataataattgcatttatcataataactacggtgtttgaattaatcatacaagacattaagcaaataaggctgattattaacgtagaggttataatatcaacgcctgttgttgaaagcatatttataaataatgactgattatacttataagtcgcagtccaaggaactatttttgctataagtggaacagtgttaaagaagatagttacaatcatagctatggcatgtagaaaaagattataaataaaaattgtaatgaactttgcaagatatactgttcctttattttgagcatgatatagtaatgtcaaaatcgttttgttttggaactccattgagaaaatagttgaacctactatgaccaaaatcaacataattatttggctagagttataacaagtcataactaacaaattgccatattgttttcccatggccaatcccataaaaatcataaaaagaatcataaaactgataatccaccaaggcagcttacggtgacctaacttatagaattcttgttttaattccgcacgcataaaagatcacctccgcctaaatagaccgctttttaaacagtaaagcgccaatccaaaagaaaactacagcgtacactaaattagcaataattaattctgaattagtcaaatgtgttacagtaaccatctcattattcgatagttgcgtaatgatattaatcatatttaatggattccaggctaaaattgatttcaaaccaggaaaagccgacattgctaaatttgaaagatccgaaccaagaaatccgattgctagtccgattatgatcactgttgcattattcctaatcaacaaaataagcattaaagagagggcaacgataaatattaaataaatcatcgttcctcccatatttaggaatagcgcattgattaagggatgtccatgataatcatcatgccaagaaaatttcgaaccaaccatcaaggtcttgagaataaacgaaaagattatcccaaataccagtaagatgaaactataaaaaactaaaacaatgaacttagctgtataaagaatggacttatgtgatgttttgtagagtaaggttgccatagtattatttcgccactccattgcgatcatatcagaactaatagcaataatgatgataatagcccattgtcctgcaccgaatccttgagataagagtgagggcgtcattttataacttgtaccaactgtatacaacattagtactaataaaacgagaatcccatacaatggaatcttgcgatgagcaaatttatagaattcgtgtgagagattaattttcattattatctcccccttgttcttgccgtaagatgttgacaatcttctgttctaaagttaagccagttggagccaaatattctatccagatttcattatcaaacagtagcttttgaattttatctatatctttatgatcaactattacagcatcatcttgtctatcaaaaggaattttagcttgttgtagcaaattggtagtttgctttatatcagttgtttttaatttagattttggatttttttcttgagtgaatttgctcataggtgaatttataataattctaccgtgattaataatgattaccgatgtcattactttttgtaattcacttaagacgtgactggaaattaagaaggctgtaccacgtgcagcgtattcatgtatcagttttcgaattaagattgtagcttcaatatccaaaccattcataggttcgtcgagaataaccagttgcggattatttaacaaagccaaagctattcctagtttttgcttcattccaactgagtagtcttttgcctttcgatcaatataatctttcatccctaatcgattaatcagtttatccataccacttaagtctttagcatagagctttaaattatcatatccagacagaaaaggataaatagcaggattttcaattaaagcaccaacagattgtagtgctaaatgatctttaagagtaatttcgtgatcattaaaactaattgaaccagtgaatttagttaatcctagcaaagttttcataatggtggttttgcctgctccgttatgaccaataagtcctacaatttcaccaggtgaaattgtaaaagatgcatctctaataatctctttgtgaccataaaaaatatttatattgttaacttttagcatgctatcctatctcctttaactccggattagacagagagttaaatcacttttctaattaaagtacctatattaaagtctagtatcctttcctgaattgtcaaattaagtgcaacagttgtaagtgtcaatgtttttgcggtagtctttaaaccattagtctaaccttaatttcttaaatatttatatgacttaaatttctgcttagcttgcttaaataactattgccagctacctgtgcggttaatgcgccatgctggatgcctaaatgaacttcatgacgcttctttaagctgtcacgggccgctgcttttaattcctgttcagtcaatacagttatttctgaatcttcaaactcgctgctaagccaaaattccagctctcgattcttgatgcagcttaagatcctaagcatgccttctgctccagattttgaccatttcttgctttgccccttaacacggtaggtatacttgcggtggttgctctcgcagcagccaatggctttagtcacagtcagttttcgtttcttaaacggcttaatatcgtcccaatgacgatcaatataattccttaggcgccccagataatcatgattgagctcggtattcaattcatcaattagtcggctttctgcagtggttaggatagttttaactttgtcatagctgtatttgtattccaaagcagaaatcagcttgccttgcaggtcaggcgcaaaatatagcctttctttgattttcttatttaggtgaaagacatccaagaaatgctcatgacgcttgcatagccctacaatgtcatcgaagtctgttttggcatatccagcaccgccatcggcgttgctaagaattacagtatcagaaagatcataagtattggccaggtactccttggcttcgttcagcgcatcaagtcggcttaaagaaacaaattccttggcattgattcgctttctgcgtttcttgcttatattgacaatgccttcacagacctgatagcgatgaaattccaaccggcttttagtgcctttgatcaccacgccatcgccttcaagatacaaaactgggacctttttcttagtgcctgcggcatcatatcttgaatctgcttcttggcccgctttaatatttttcccggccatttttaccaaattgcccacctgcatatggctaatattaaagccagacaggcaattgactgctagagcagtattgcgataagtggcaacgctgcttacttctaagatgtttttgactgctaaaatactgtagcgcttgtatttgtcaaagcccattaattcatccaagggatatcttgcttgtttgcctgggcagacatatcttcttctgacatacctaacttcgccaaaagccatattgattgagcgctcattcttcttatcaatctgatagccctgtgctttaaccttggtaatcatttcatcatcaactttagctaaagccaaggccatgatttccttaatcaggtttaagaagaaacagattatttttctttcacgcttaatataattatcttcagactttataatatttgcgatttcagttacaattgaattcataaaagaccagcttctaatgtgttttttgttcttaacatcagactactggtctttttgtttgagctcaagtccaaattcaaaggacttgggcttttttaattatttattcaacttaccgtaaaaaattatacacttaggcaacagttaggctatgaagaaatatattgcttgaagagttcttctgctgtctgatattggaggattcggcgatatttgtggttaatggcattggttgcctgttgaacataagcttttgacttgtctttcatgctcttgcccttagggaagaattgacgcagaagtccattgcagttctcatttgtgcctctttcccaaggagaatatggatgagcaaagtagatctgacatcctttgattttggtcatatccgcaaactcagaaccattgtcaaacgtaattgatttaaaccaattaggatgtctgtcaatctccttttgaagcagtctttgacaagtactggcccgatagtcaggaattttgataacaacctcaaaacgagtggttctttcagtcagtgtcattaaggcaggttgatttttacgtctgacgcctttaaccaaatcgccttcccagtgcaggggaacttttctgttttcaacttctttaggccgctgttcaatcgaattgccaagattctttttatgcggagcatggccaccatgactatgatggcgtttgtttctgcgtcttttaagcttcattggcaggtcgatattgcttatatccagcaatccttgatcaatataacgatagacagtgggcgtgctaggacatggataatttggcataatcctgtgaaattcaccaacgaattcatcaatgctagtggcataaaatttggctttaaagcgtctgcttagcattctgaaaaagacggcatagtgttgcagtggattacacttatagcagtttctgcggcgcttttcatgataaatttgtgcagtatcagcgtaatagtgctcatacaagacatagctgctgtctctttgcaggacactgcctcgtctaatttcacggctgatagttgatttatgacagcctacttcttgagcgatagcagtgcaggaggttatgccagaatcaagcagagcttgaatttgtccacgttgttcgctgttcaattgatgataatgcttggaaatgctagaatttgagttggtcatgaagatcttcctttcttgatttttggtcacatcaagtttaggtcttcatggcctttttgtttaacacttagtgttgcacttcaattttaaatccgggtctagtatccttttaataaatattttttactatgttcacatatgaacaataaatttaagattatctctaataaaaccgattttaggatttttttgaataaatttgctttatttgtttaaatgcagtttcaaaaccatcttttagagtattcaagccctgcagttctaaagcggcccacatcaaccgtaaattgcgatcatcatttgtttccaaaaaatttaacataaaatgcatgtatttgtatcttattttttcaaaagcaaacctgtctgtaatatctaagccagaaattattgcatctaatctttttgccttctttagatcttttttaataagaatatattctgcattaatcaaagtatttaaaatagctgtagaaaatttcatttccaaatcgttattatttttaaaatagaaaactagtgaaaaagataaactataaatagttcttgggctaataagattctgagtattaccaaagaagtacacatcatcgtaataccaaacttcatctccagataaaatttttgaaaagtacatcgataatctctttttatagttatctgtaaaaatatccactcctgtaagatcgtaataagcattacaataaatggctgcttttaaaaaagttcgtttatcgaaactgtcattttcaacttctgataacaattttttagattgcgtttttaagtaattaatatcattactttcatatgcttttgaaacttctaaagttatattttttagataattcgaaatattattattaaagaaatctattttttggacatgaattacttcgagtagtttgaatactttttcaatatctaaacctgcttcgcctctttcccatctttctaattttgaacgagaaatacctactgcttccgcagctttactacttgaaatttgggttgcctttcttaattttctaccatatgtttctttcataacccactcctagttacgttcacaaataccttcaaaataatgatccagataaaggactagttttacctccttaatgatgccttaatgcaataaaaaatcaaactcataaatattacctaaattttcatttagagctactaaaaaagcctaataccatcatcaagggtattaggtctttattacctaggaaatactaacgtacagtttccaaacaatatgattttttatgacagtttgggcaacgcaattttctagtatgtggcgtgtgtgccgcaaacataaagcttttaagttctggaacaaatttgtaatcgcaattaggacaaatatatgccactttttgataataatttttaagtaacacgaatgacattgcaatcaagcttactactaaaatagctaccgaaatataggctgcagtgttcatcttattgatgatacagtacgcaataaatgccataccgaccaattcaacagtgatttctactgctgacaatttccacattgaacgtgttacctctttgtatctagtttcattattcatgattttcgtaatgtcagtaacttccgcaatattattgggtttacttagaaccttttgtagttggataattttcttgttttgctcttctaatttttgcgtttctgctttatttctttttagttgatcttcaagcaaaagatcgattaatttatcaccatttttatcttctagtattttttgaatatcctttaacgaaaagccaagctcctttaaaaagatgattaattttaattgttttacctgctcatcagaatataaacgatagccactttcactaactcgactgggtttgaccaaacctttttgatcatagtaacgaatggttctagtggttatgtttaacttctttgctagatctccgattgtgtattctgacattactttctcacctcacaacttaaatatacgggtttacgctacgtcagagtcaagaataagctaaattttccgtaaaaaacttcaaaaagcaaatattttgctcttttcctattgaaattattaacattaactgtataattttaagtgaatgttcactttatacaaatttcggaggactaaatgaacgcaatcagtaatttctttcatttaaaggagaacaatacctcctttaagaccgagcttttagccggtttgactacttttgtaagtatgtcatacattctgttcgttaacccaaacgtcctaggtgccagcggtatggataaaggtgctctattcaccgttactgcattgtcggctgcctttacctgtatcgtaatggggcttatcgctaactacccaattgcttccgcaccaactttgggcttaaacgccttctttacctatactgtttgtttaggcatgaaggttaagtggcaaactgctttagcagctgttttcgttgcatcaattctgttcattttgttaactgtctttaaggtacgtgaaatgatcattgatgccatccctgccgatattaaatatgctatttccgcaggtatcggcttattcatcgcctttatcggtttgcaaggtggtaagttgattcaaaacagtgattctaccttagttactattggtagtctcaacaaccctactgtttgaatcactatctttggtttaatcattactattttcttaatgattgccagagttccaggtgccatcttcatcggaatgatcgccgctgctgtttttggcatagtgactggtcaaattcccatgcctaaaggcgttatctcttcagttccaagcattgctccaacttttggtcaagcagtcttccatattggcgatattaataccgttcaaatgtggatcgttgtctttacattcttacttgttactttctttgataccactggtaccttaattggtttggttcaacaagcaggtctgatgaaggacaacaagatgccacgtgctggtgaagctctagcagctgattccagtggtatgttggtcggttctgttcttggtacctcacctgtcggtgcctttgttgaatcaagtgccgggatcgctgttggtgggcgtaccggtttaactgccgtttgggttggtattttcttccttatttcaactatcttcagtccaattttgagtgttttcactacccaagttacagcacccgctttaattattgttggggtattaatggccgaaaacttggcacacgttcactggactaatcttgaaattgccatcccatgtttcttaatcgcattgggaatgcctcttacatactctatttcagacggacttggctggggtttgattgtctaccctgtatcaatgatcgcagccaagcgtttcaaagaaatcacgccaatgatgtggattttgtttattgttttcgtaatctacttcgttgttttaaatgtaaaataattctatcttataaaccctatcttacttttacattaatagatacccccatctaaccaagtagcatgtctacttggtttttatgctaaaaagatgtctgttaatagtatggatgatgacagcagattctattagatgatataataatcaaagaaaggctgtgactaaaatgaaatcatataaaaaaattcaagctaatgttgactcctcactagcacttcaagcagaaggaatttttcaagatatagggctcaataccactaccgcaataaatgtgttcttaaagaaagttgtggcaactggtggtatcccatttgaattaaaagaaactcctgaacaaaaagcctcaagagaattaattcaaagcatctccaaaattccccacaaagaagctaaaaccaaaaaggaaattgaggattggctagatgaggactaatgatattgtagatatttatgttgcttacattgataagcctggaggaaaaaataggcctgtattaataattaaattactaaacagtaaagcttggctgctaaaaatcacttcaaaatataaagaaaaaagtgaaaatatccgaaagcattactttcccatttttgactggaaaaaatataatttagataaaccatcatacattgatactaaaaattatttaatagttactattagtgatttaaatatcgaaaaataccgaggccatttctcaatagcagatttacgcaaattaaaagattttattgacgaaaattcaaactaagaattaaactatatgttttagttcctaaacacaatctcaaatatgagattgtgtttttatttatccaaatggcatcttttgataatcatttgacgccttatgatgttcggattcttctaaattgccgctatactattttcaacaaatcgagttatgaaagatttatttaggaggaattcattatgacaactcaagaaggaaaaactgctttaattactggttcatacggtgggcttggtacccaattcgttaacattcatgcttcacacgggggtgacctaatcctagttggtcgcaatgctaagaaattagccgatcaacaaaaagaagcccgtagaaagtacaacgtaacggcgcatattatcgatgttgatctctcacaaccagatgctgcgcaaaagatctatgatacttgcaaaaagaacggttggactattgactacttaatcaacaatgctggctttggtggtcaaggcgaattcattaaaagaagtatggaacaagacatgtccatgatcgccgttaacattgaaacgcctactcgtttaactaaattatttttacctgacttcgtaaaacgcggccgttatgcctggcccacttcaagccgtttactacgctactaaagcatacgttacaagctggtcaaatgcgttatggcgtgaagtacaaggcacaggcgttacggtaagctgcttaatgcctagcgctatgcaaaccggttttatcagtcgtggtgatttgagttcaactcaattattcgcccatgcggttagtccataaggtgttgcaaaagctgggtatgaagaaatgattgaaggcaagcttaacattaccgctggtttaactgcagcccaaaaaccattcatgaaattggaaccaatgttacctaagaagatgctcatgaacaatgtttataagatgcaagaacaaggtagtagaaagtaatcaacttatcttataatatggatcaaaaggatggtatttgaatgaatcactttattttagatggtcgctatgaagacctactctcttttaacgttgaagaagcacttaaaaaagccaatattcctgaagattgtttcaaaaaactccatccttcaatgagtgaacaacaatactacaattttatggcggctattggtgatcagattagtgatccattcactccaattgaaattgcaactacaaatccaattgaatctttctctccaccaatttttgcggcatatagtagccgtaacggagatatttttatcaagcgtctagccaaatataaaaagctgattggcccattatcttttaaaattgatgaggatagcaagcagctctctattaccctaactccaagtaatcagcaatattccctaccctcttttctagttttatcagaatttgcatttttagtgggacttttgcgcaagacgaccaaagaagctatttccccgctgaagatcacaatgacatcccccgtcaatgatgagcaggtcattaacttctttggctgcaaaatcgaatcgggtaaacgcaacaccatcacttttgccaaaaaagacttgcaggtcaattttattagttataactaagcaatgtgggattatttcaagcctgaattaactaaacgcttatctgaattatccgttgatgattcaactagtgctagagtacgtagcatattgaccgaattacttcctaatggtgaatttacaattgacgatgtagctaaaaagttaggttattctaaacagactttacagagaaagttgagtagcgaaaaccctacttttcaaaaacaactgaactccacccgagaagttttagcgctaaattatttacaaaacaccgatatgacaactagcgatattgcttaccttctaggctatcaggaatttaattcgttcttacgtgccttcagcatctggaaaggcataagcattagcgaatatcgtgaaaaaatgaataaataataaaaagcagatatattttctgtttttttactttataaaggaaataatatgagatttttgctataatttactttataaaggaaataatatgaaaattgctaaaaatttactttatgaaggaaataatatgcagttaaatttaattaaccgcccacagtatttaaatcaattacttcaatttcaaaatacagaattcatcaaagtactgacgggagtacgaagatcaggcaaatcttatattttaatgctttatcgtgaatatttactcaaacacaacataaatgaacatcaaatcatttatatttcttttgaagactttgataatatagatctttatgaacctaaaaagctttattcatacttaaaagaacgaattattagtgaccaaagaatgtacattctacttgatgaaatccaatatgtatcagattggcaaaaagtagtaaatagccttcgacttaatcctctacttgatatcacaattactggcagtaattccaatctattaagtggagaattagcaaccttactatcaggaagatatgtagaaatacatgtttatcctctttcttttaaagaaatgctagattttaaacatatttctgaaccatcagagcgtcagattgataacttatatgatgaatacattaaatatggtggtttccccgcggtagtgttagcaaaagaagaattaaaacaaactattctttctggaatttacaataccattattgtcaatgatatcggctacaaaaatggattaagagaaccagaattagttgcattagtagctaaatatctagcagattcgattggtcaattaattaatccgaacaagattgtaaatacactaaaatcagcaaattttgatatctcttataacgctgtgcagcgttaccttaaatattttgaagaagcatatcttttttataaatctagtcgttatgatattagagggagaaagattctttctactcaaggtaagtattacattgtagatactggtttgcgtacccaagctttaggagaaagaaataatgaccgcggtagtgttttagaaaatatagtttatgtcgaattacttcgccggggctacacagttcaaattggtaaattagataataaagaaattgatttcatcgttttcaaggtaaatgataaacaatatattcaagtaacctaccagcttccagaaaattctactagagaaactgataatttacttcaaattccaaataactacaaaaaaatagtcatcactggccgatatgaaaatgaagaaatgatttccggtattccaataatcaatattaaagattggttattaagctctaaaaactgatcaaaataggatcgactaactcatgtcgatcctatttttaaattaaattatgttttttacaataagtaaaaattccgtcatcttgcacgctgccacagatgtcatcagcaatttccttcacatcgtctgttgcgttccccattgcaacgccgtgaccaacagtctttaacatttcaatatcgttgccgccatcaccaaaggctattgcttcgctcacagggatttgataataatctaacactttttcaattgctacacccttactaccagtagctggaataatatctgctgctctatcccaccaagctgttaccttagcattttgcgtattagctacaagtccgtcataatctttttcacgacagcctaccattatttgataaaccgtatcctgatcgacaaccacatcaaaatctggcgccactctcaaatccgttccaccaatagcaaagtattcctttaaatcctcatcaacaccattagctgcaatccgtgttttggtagctacagctaacggccgatttattttctgagcattttgaatcatatgcaagacatctccttgccttaacggattatcaaaaacaatgtcttgatcgttatagcagtaagaaccattaaaagttaaatatgcatcaaaatctacacccaacttaggcagttgcactggtggtctgcctgatgcaatacaaatcataatgccgttgtcttgtaaagcatgcagtgtctctagcattttaggtgtaattgattttttcttttcaattaaagtaccatctatatcaaaaaatattatcttaggtttgctcattatttttaccttctaaagaattttctactaattattatactttaaccgatatttcccaggaaatattaaaattgagctctcttcctcaacatctgtgctaaactagatacaattagtttctttaaaagttaatatttacggaggaatttttaaatgcagacattggaaaaagtctttcatttacaagatgctcataccactgttaaacgtgagttaatcgctgctttaaccacttttgtcagtctctcctacatcttattcgttaacccaaacattttgcacgcagctggtatccctaaaggtgccgcttttactgtaacagctcttgccacagcagttgggtgttttttaatgggttttattgctaattatccgattgccttagctccaaccttaggtagcggtgcctttttcgcttataacgtatgtgttgggatgcatatttcttgggaaacagctttggctgcagtccttgttgcttcagttttattcattttaattactgtctttaaattacgcgaattagtggttaatgccattccacaagatatgaagtatgctatttcagcaggaattgggttattcatcgcttttattggcttaaaaaatggtcaattaattgttaacagcgattcaactttagttactctgggaaaatttagtactccagcagtttggatcacattatttggcttaattttgactgttgtattaatggcattaaacgtgcctggttctatctttattggaatgattgttactgccatcttcggtatgatcattggtcaaattccattaccacataacatcgtttctggtgccccaagtattgcaccaaccttcggccaagcggtttttcacattaaagatattaatacagctcaactttggatggttgtactaactttcttattagttaccttctttgatactgctggtactttaattggaatgactgaacaagccggtatggttgacaaggatggcaagattccacggatcggtcgtgcttttttggctgattcaactgctatggttgaaggtgcagtctttggtactgctccacttggaacttctgttgaatcaagtgccggaattgccatgggtggtcgtactggtttgactgctatctttgttggtattttcttcattatcagtatgattttcagcccattgttacaagtaattccaactactgtaacggctcctgctttaattatcgttggtgtactgatggccagcaacttaaagaaaatcgattgggaaaagttcgaaattgcctttcctgcttttcttaccgttgtagggatgccactgacttactcaatttcagatggtttggcattaggcttgattgcctacccaattaccatgattgcttctaagcgttataaggaagttagtcctatgatgtatatcctgttcgtagtatttatcatctttttcttagttacgaatttataaaaagaatgctaaagataagcagtttgaagctgcttattttttattgacttgatttttattttgtactactgtaataaatatataagacagtttttatgggagaagaaaaatgagactgtaaaatagtttgtgtaaggatgaatgattccttaaatttatttctttaaacattagaaaaaggagttcctttctcgtatgattggtttgaacaaaaaacacatacagaaagaagaactccttcatgaatgattttaccaaaaatatggctcaagcactattcgatcaagacaaagttaatgattttttgcgcaaggaaattcaaactgcagttaatcaattgcttaaagttgaattgactgcctttctgggctatgatccctatgccagaaatggctggaatactggcaactctagaaatggtgcttatttccgcaaagttgatacgcaatttggcccaattgaagtgcaagtgccccgggatcgcaacggtcaatttcatcagcacacgctgcctgactacaagcagcactcggatatcttggaaagcatgattatcaagctttactccaagggcgtgaccaccagggaaatagccgatctaattgaaaagatgtatggcagccattatagtccagctcaggtatcaaatatttccaagcagatgctccccaaggttgaggcttatcacaagcgcaagctaagcgacaagtttttctgtgtctatttggatgcgacataccttcctttgcgccgagaaacgtttgagcgtgaagcagtatatattgccattggcattaaacctaatggacataaggaagtcattgactactgcattgctcctagtgagaacattgaagtctggacagatatgcttcaaaacatgaaggccagaggcttgaagcaagttgaactctttctttctgatggtgttgttggcatgaaaacagccttggccaggacttatcctaaagctcattttcaacgctgtttggttcatgtcatgcgcaatatctgcgctaaagtacgcgtcgacgatcgtgaaaagatcatgaacgaattcaaacaggtgcatcaacagacaaacaaagaagaagccacagctgtcctgcatgacttctataccaaatggggcaaggtttacagccatgttatcagaagcttgaaagacatagaaccagatctgctggtcttttataactatcccaagcagatcagagcttcaatttattcgactaacatgattgaatcatttaacaatgtgatcaagcgcaaagctaagcctaaagcagagtttccaaatgaacagtcgcttgatacttttattggcattcaagcaatgagctacaacgaacgctatttcaatcgaatccacaaaggctttggtcaggttcaggataccttagaatcctactttgattaaataaaagattaaaaaatcaatttacgagaaagaactatttacacaaaagatttgacagtttcagaaaaatgaaaatcaaaaaagtactactgaccacgtctttactcacgattagtttgattactctatcgggatgtagtttccacctgtttaccaacaagaattccggtcctacaatcaaacgaactttgtcctctaagaaattcaattcacttaaggtagccagtgacattactgatgttgaattacatgcaagtaatcaatacaaagttatctatcatgggctcaagcgtttcaaacctagcgttaatgtgaaaaatggtcagttaaagatcactcaaactagtaatggtgtttcttataacatcaaagaaggcaatacagtggcaatctacctacctgccaaagaattacaaaatatcaatattaatctttctgatggcgatatcgatgctgatggcaaggttcaagcaaaaaatgtcaaacttcacagtgacgatggtgatgtcaactttgacgatttaagaattagctctggcaaaattacctcagatgacggcgatatttcagtttctaatctacttactagaaaaggcgccacagttgaatcagatgatggtgacattcgtattagaaagagcaatgccagtggttaccgcctaacttctgacgacggtgacgtcacattcaagggagatacttctgataatgatgacggtggttcttactacaaaaatactaagagttctaacctgctctctgctcacagtgatgacggcgacgtcaacgttaactaaatttcgtcataaggcgataagtttcacatgaaacaaaaaatcaatgcatcattgataatgcattgattttttacttttttcctcattcatagcataaacacgactttacaagattatttaagtttctattgaaatagacataattttaatacgaaaaagataagactaaattctacttttccattaaaaaatatttaccaattttccattttctaagtcaaaatgatgcgtaaatttcttcatcgtcgttgatgaaatatggtggtcaatttcaattactgttaatggtgaattcaaaaagacattatgaatttgctcagcagtttgcggatcaagtgaagcagttccttcatcaactactaaaatttctctttggaagagaaaagcacgcgctaattcaattctctttctttccccacctgaaagattatgcccattttcttcaattacggtatctaagccatgtttttgaaggtaattagttaatcctgcttgttgagccgcagccacgatttgcttttgatcaaattgtttaccaagagttaaattaaagcgtaaagtcacattaaaaatttgcgaagattgttgaacttcactaaaaatttgcgtttcaacagcctgatcattaaccaaaactcttcccttctgcggagataatttacccattaacaccttaagtaaagtagatttaccttcaccagactttccggttaacagaattttatctcctttattaacacataaactcacattattaagcactggactatcagcttgatagccgaaagttacattgtacatatttaattgcttaaatttgactggagcttcatcttgcttagtcgttaaaggcttgaaagataacaacttagcggtcattggtttagtagcagcaatctgattacgaatactattaatactaaagaaactatttacaatccaagcgctagagtattgaacggcaacaaaagaagccaaagcaatgtgtccttgaattaccataataatgccgattccaattggtaagaagtctagtgagtaagctaataaatcaacgtaaaaatcacttttagcaattgtatcgtcacgttcacgtttattctcaacagaatttttaattactttactacccttctttacaaatagagataatacattgtaatttaaaaccgtattgatatttttgagtaaatccgacataaacgttacataactacctgttgatttactccaattggatgactgattggctgttttcttgctaaacaaactaggaataaggcttgaaagactggcaaaagcaacaaagactaatgtcaggactacactatttatcagcgcaatagtaacgataccaacaattttaaccacagtagatactagtgaaaataactgtctaaagtacttttcttcaatcaggttaagatcattattaatgaaagaaattcgattagaaatttctttttctcctgtttttacaaaatccgtctgcatcagatactcacgaacttcttgattaaatagtgctacattacgattaattactcgattatttaagtattctacaattacaagtaagatttgcaatactgtaattacgataatcattctcaccgtatttggaatacttttacctgtaattaacgcaaaaatttcggagtatgaccatgtgctaaaagacaaagataatccgcttaaacatgacagaataatactgagcgaaaaccatttgaggtcaataaactttttcataaatgaatctccctttcaattaagttggattcattatctgctttagttcacgataaaaatagctttctgcaaaagtgatcttcaatctgcatatatgcagattattctggaagaatagacagaatattttctaaattacttgccttgatcaatttcttaatagctaatacctgctctgtatctccagcaaaatagcattgataaaaatgaccaatgattttatataagactaaagatggcgtttgacttaattgcccaagtaaataaataggctctttattatcttttacaaatttattttcagcacaagtatataaataattcacacaaatagtggcaattgttgtttgcattttttctgtctgctcagacattttatcattataagtagtgaaaattttttgaaagaaaaaagcaaaatcgtcatgagtaaagatagaggtaccaaaattggctaacaaatctaaactaaatttatcttgaagccaattgtcgcctgcaaacaagcgttgcagtactatatttttatctttgacatcaaatttacgttttccttctagcaaggtaagaatcaacttagctttgattttcagaagatcatgatgaggcagttgttgaatttctgttaccaattttctaacttggttaaagtcttgattataataagcagtctgtaattgatcacctaaattgttttcatcgtcagcttgtgcgactgaattttgcttaaagaattcatcaaatgaaattttatttttctgcaaaattgccattaagtccttagctgatatttcatgcaatccgcgctcaatcttagaataatgggcaggtgataaaattcctgctacaaattgttcttgcgtcagtccccgcgattggcgcgctttttttaatgctgtgttaatttccatagctgtttttatttcaatttacggtcccttttagatacaaaccaaattgtcccatcagaagttgcccagtgtccatcagaagttttatgaaatttcagcgtcagtttcttactgtgtagtgtccagctatttttaccttccattgtgacacggacccggcctaatttttctgaatttattttgttattgtagtctttgggatcatatgaattatgcccatatactttataaattgcttttgctgccgcagtatttggcttaatgtatttataagtaccagatgcatcagtcttaaaaactgggctggatgcatcgatttgaccactatttttccccagagctatgttcaccaacatgccaagatgattttccattacagaatctgtttgatggggatcataggttgtaagatttttattagcaaactgttctggaatagtttgctgattgcgataaaacaaccagccaccgactgccagaactacgactactacaacagttatgattgtagctttctttttcataaaggatcacctgttatctatcagcttttttctgaaaagtaattaatccgtgtgaaactaatctaacagttccgccataataaactacccaacgtactttgccattactgtactcttcatacattctctcccgctgaagatatccattatatgtaccatcattataaggaatttccatcggagtatctacagcaccatcataagcgccataacgcgtcttatgccatgggcctgttctcttaactccatgaacttttttagttaacggtagtttttgaacgttttaaactgaatctgtactagattccgcagcagatacaacagcagtattagtggttgcaaacagagcagttgctgagaataacactaaagttgcttttcttaatttcatatctaacaccttatacctttcttttattgtttattttcattacctagttgttcattatcattgacaacaaaatttgtcatcattttctttttacttgctaatgtaggaattgggtagcttttaagtttagtattatacaaatagccaccgtacataattcctgttggattatgccccattggaacagtgtacatcttttccagatatcctctaaatacctcattgcctcttcttacagtgtaataaacataagtaccctgatcacgatagtattgacgttgataccagatatgttcaacaaatccttttgattcagtgctttgtgttgcagcttgtacatggtttgattgaaccaaagctgaagttgaaactgatactagtgataaagctaatgctgccttagctgttaaagttaaaattttcttatttcttttcttgctttaattactacctaatccagacggaataggaacccatggacccatatttttttctcctttcttatttatttttcattaattttactttcactactaagaactgttcagaaattgtcaaagatgacaattttctacaataaaattcttaatcaaatgagacattccattacttttcataaattcaataatctgatctgcttcttcatttttgccatcaaaacaataatggtaataattggcaactattttagcaaaagcattacgtggaatttctggcaatttagaaatgaaatcgtaaattagatttaaatcaattttccttctttgtacgtatacattagccaaataattaatagctattgctgacattatttcttgtagctgaccagacagattagatacattatggcgatacgttctaaatattgaattaatcaaaaagtccatatcttctggggcatatatcatcatagtcattgcaaaaatttgtagagtagattcactccactcatcagaatcaaagacaatttgtctaacttgtcgtttaatattctcagatatttgatcaatttgtttctttaaagatgctattgaaaataccactaaagcataaagattaaatatattctgactttgatttttatattttccaatttcaattttcaaatcttcaagtcgttcgatctgctgatgataatatgcatcttctaattgcttttgccagatcaaatttttgtgagcaagatcattttcactatcttcattttctattcgctctaaaaatatagaagcttgcaatccatgttgctttaacaaatcaattaaatcctgagtctgaatatcatttaatccacgttcaatttttgaatagtaagatgttgataacacatcccccgccatttcagtttgtgataatttcatactttttcttgtttgttttaatgcttcaccaattgtcatatctttccctccctcgtattatcatatttttcattattgtataatgttttgttaattttgcaatagtttgtaaaacaaaagcattatttttatttttcaatcttttatgtttacaaatgtaaacttagcaagtagaataaaaaatgtgaagagatgaaaataaattatttaatttggaggttacggtcatggatgtaactaaaatcattatccttgttgtcgcaatcgccttgatcggctttatcctttggtggttcttcggcaaacatgacgaagctatcggtaaagcaagtgttaatcaaggcacacaagaagctaacatcgtcgttaacggcggttactctccttctaccattgttttaaaacaaggcgtaccagctaaggtgaattttgatatgcaagactctaccgcctgcttatcgcacgttgtttttgaacaacttggcgttaacaaagatttaaccaagcaaaaaatcactacaattaatatcccgactgataaaaaaggcacttataacttcgcctgcggaatggatatgtttcatggaaagattgaggtcaaataatgagtattttttcaaagaatcaaatcaaaaaagttgtcgttaatgcagataatcacggttacaagccagatgtagttaccttcaagcaaggcaagcccgcacaattgaaatttatcccatcagataatatgggctgcatgaatgaaattgtatctaaagacctgggcttcgatcataagctcgatggtcaaaaagaagttgtggtagacatccctaccgaccacgcaggaacttataattacgcatgtggcatggacatgtttcatggaaagatcgtagttaaataatgaaattatctaatattcagcgtttctggatctcctttgtactctccatcccgatgctcattcagatgattgccatgccatttcactggatgatgccaggatacaactggattgcccttattacgacaaccattatcatggcaatctcagctgcaccatattgtaagagtgcttggggcgccttcaaaaagcataacgctaacatgaatacgctagtggccgtcggtactgctgtggcttacttttacagcatctacgctatgttcactggccgcgaagtttacttcgaaagtgctgcttatgtaacggtctttgttctacttggggatgccatggaagaaaaaatgcacagcaacgcttccaacgcactagccaagttagtcgacctacaagctaaagacgcagcagttttacgttacggtgaatttgtcaaagttccactcgaacaagttaagccgggtgatacaattcgcgtaaagccgggtgaaaagattccggttgatggtgtcatcactgatggctcaactaccatcgacgaatcaatggtcactggtgaaagtatgccggttactaaaaagaaaggcgacaatgtcgttggctcaacgattaacaccaatggtactttcacttttaaggctaccaaggtcggtagcgatacgatgcttgctcagatcgttgatttagttaaaaaggcccaaaccagtcatgctccaattcagaacttgaccgacaaaatttctaatatctttgtcccagtcgttttaattattgcaattattaccttcgtaatttggtatgttttcttaggcgcaacattggttaatgctatgctcttcgccgtttcagtagtcgtaattgcttgtccatgtgcactaggtttagcgacaccaactgctttaatggttggtactgcccgtagcgctaaaacgggcgttttaatcaagaacggtgaagttcttgaagaagttagcgacattgataccgttgtgtttgataagactggtacaattaccgttggtaagccacaagttactaatgttgtaggtgataaaaacaaggtcttaactattgcagctagtttggaagaaaattctgagcacccactagcaaccgctgtagttaaagctgctaaagaagcaaagactgaaattaagtctatacaaaactttgcagctattgaaggccgcggagttaaggcaaactatggcaatcaagaagcttttgttggtagcgatcgtttattagaagatatttctatttcccaggaaatgaaagatcaggctctccaacttcaaaaagaagcaaaaactgtagtctatgttggcctaggtaatgacatcattggcttaattgccattcaagatgtacctaaagcaagttctaagcaagcaattgcggaacttaaaaagcgtggtttaaagacggtgatgcttaccggtgacaatcaaaatgttgctgaagctattggccgtgaagtcggaatcgaccaagtaatcgccggtgttttaccaactgaaaaagccgctgagattaagaaattgcaggatgaaggcaataaagtagcctttgttggtgacgggattaacgacgcacctgcattgtctacagctgatgtcggaattgctatgggatcaggtaccgatattgctattgaatctggcggtatcgtccttgtacagaatgacttaatgggcgtagttagagcgcttgagatttctaagaagacctttaacagaattaaattaaacctcttctgggctctgatttacaacacgatcggcattcccattgctgcaggtttattcatggcctttggcgtgcagcttagtcctgaacttgcaggcttagctatggccttctcttctgtttctgttgtaactagttcacttttattgaataaaacaaaaattgctggtgaaacagctcaagtttcaaagtaaaataattctccgaccggatattttaatccggttttctttttgtaaatttttcaatttgcgacttaaagtttcagcagtaatacccaaatatgatgctaagtctttcttttttaactttaattccacatttttactcccctgtttttgagctaagtcttgcaaataggccattaagcgttcctgagcatccattgaattgcgccgaatagagttagtttcgattgtaaccagctgctcgccaaaattattaagcaaattcaatgctaaatctggcgtctttttcaataacttttgaaaatcacgacgctcaatagaacaaacataagtatcttgtaaagcctgcacaaagttttcctgggcatgttcttgaaaaagattctgctgtccattagcatcgccttgattcagcacacctaatacggtctctttaccgtcttcgttgagattgtaaatcttggcactgccttgatccataaaaagcattccgttcttaccatcacctggttgtcgaataatactgccttttggaaaatattcttggtgcgttgaaattggtactagtttttctaacatttcatttggcaaatttttaaatatggctgctttgcgaatacaagccatgggtgaatgttgcataaaagcctcatttcttgatctaagtcaatttatttttatctgcatcttaatacaatgtatttaacaactcaagcagaaaggaaatattaatcatgactaaatacatcgcacatattgagcctttaaacgctgaaaaaattggtactaaggcacacggtactgccacttttgaagaaaaaggtgatcaactacatattcacgttgagatgtttgatactccagcaaatattgaacactgggaacatttccatggcttcccgaatggtcaaaaagctcatgtaccaactgcagctcaagacgttaaccatgatggctttattgatttaccagaaactgagccggtctcaggaactacaatggtgccacttgatgatgccccagaaaacatgaatattcctcatgatggttatcctgttgccgacagtaatggacattatgaatatgagattgatgtctcattaacaaagctacaaaagaaattcaaagctgcctttggtagcgataaactacaactagacaagcgtgtagtttacgttcatggtgtacctgcagatctggaattacctgatactgtaggtggttgcgtaatgagttatgatgcccatactaccttgccaatcgcagctggtgaaattgaaaaagcttaagttaaaagccattccttgtgaatggctttttgcatcctttcttattttttgatagcatagatatagattatgtaaagtatctaagaaaaggagatgttttataagtaggcttagatcctactcttatggagaataacgaaaaaattatccaagaaaagaaacgcgaaaaatttattaaaactaaaaagaattacaagcgtgcaccactaatgtcagttcacttaagagtgatgatggccgttatcttaggtcaaatcgcctgtggctattccctgggaattagtggtaccgctctttctaatgcagctaaatatatcaacattagtgacttctggactggattaattggggctggtgctttaattggccttgctggtagtcttttggtcggtcgactttctgataaaatcggtcgccgtaaactcttaatgtggaatatgtatatattagctgctttttctttattacatctaataaccgctaattttagcttaacctttatcctccgtattggaattggtttaatgattgctgttgactatactgtagggaatgccttgttaaccgaatggctacctaagggtgaagacagcaagcgccagagtcatttattaatctactggactattggttttattttgtcttacctagctggtagttttatcactggatttgatagttatacttggcaaataatcttagcaacaagtgcagtacctgcactagtaactgctatcttcagaagtcttttcccactccctgcttcaccaggctggctagcaagtaagggtaagattaagacggccaacaaggtcattcgtaagcacatgggacgcaaatggagattacctgcccgctttatgaagcggaataaaaagaaaactcctagaaatatttcctgggcaattttattttccaagcaatatctgcgacgtactctagtaggtgggattttctatgcctgccaagccttctcatttttcggtattagtatcttcttgccaattttattacaaagcatgaatatcactagtggaaatatctcaggaattatctacaatggtgggatgttcattggtgtgctaatcggtacctggatctttaacaaggttagccgccgcttctatcttatcagtaattttctaatctcaggtctgctaatcggcattttagcaatagtacctaacttaaattcaatacttaaattaggtatttttacgttatttgcgattattttatcagctggtttgatcctagattatccttatccgactgaattatttgatctgaaggtacgagcaactggtgtaggtacttgtattacaatcagccgaatcggggctgccgcagggactttcttattgcccgtcttaactaatgtgggtggtgctagcctggcaatgctagtttgtgcgattgttttactctttgcctttatcgtttgcctcatctgggcaccggagacctcaccccaatttatgaaaaaataaaataattaatatgctacacaaaaagacagattacatatgatgcaatctgtcttttcttatttcttatcttttttcttcttgtccttagaatccttatttaataattcttctggatccttatgcttaggcgtcttctttggatctggtacagttgcaaagcgatcaagcatcttctgtaagttattagggttgtcaaaagttaatcccataaaacatcttcctttcgttttctcaattatattaaaatttcaattcaaatgacaataattttaaccctcattatcaataaattgttgcatcttaatcatttctgaaccagccagatcaacactaattaaatcactataatcatgaacactagtatctcctaaaccatattcagttacaatttttaggtcgaagccactatcagagcgatcttcaattaagcctaaacgatcaggataatgataaattgaatcactaattttcactatttgatcttcgggccaattatcaataatttctgctggtgactgaatttcatcccgtaatttaactgaacgctccagcctgtccggatcaaaactgccattatttttttgccattgaactaaaaaattaaagaagagcaagcgctcggaatcttcagtaatatgcgttatatggctcctagcaatcactgcaattgattcaacctgccctaactcattgatgctctcgaataccagattatcatcgtcatacttgagtactttaccaatagcaaaactaccatattgatcatcaaaggtataatcaaaataaatttcaaccagatccaagtcgttagtgaattcttgcttctgtgattgccgcaaatattgggtaaataagcgattatcaatggcattagtatcgacacaaacaatatcgtcaagtggtataacggtggcataatgctctaaagttaattcattgcgttctaaaatacgcacctcttgctgatcaagttgagtaattaagccagtgtaagtagcacctgtattcacctcaaaagttgtaaagggttgcgcgtcagctacgttaatcagtaaatcatgcagattagtaaaatcccaggctaacactgtcttatttaattgctctaagttaaatgaatccttaacttgggtaatcatataatagcgtagattaggcgtatcgtcttcaatcttagctacttgatcttctttaataaagactattccacctaaattaccgccttgatcgactgattcaaaggtaatccagccatgatgttgcgtgataatgcggccaatatagtaagaatttgcatcaactaccgtaatacttgcatccccacctaagttatatttttcttgatcagccttaagcgtgatttgtacaagtttattcaatttttcgccccctcttttttcttccgtgaatttaattgtcgcctaatcattatttttctgcaagaaaaaagaagatggtttagccatcttctaatattgagttaattctgtagaattttggggctaacgaatattacttcttttgtgcagctgcctcagcttctgctgctgtgtttgaaggggttaacgaagtactgtttggatcaaaacgcacatcgcttgcttttacataaccatcagcaaattggacttcaccttgattactatagacagatttaccaactaagtgataaaacagttctgccttattttcacttggtacccagatgtaaagcaacttatttaccttgtatcttccaccttgttttctaacttgatcgcccttgaagtcaatcttgtttccgttagcatcatagatatcagttggcttaataaattgaattagtgattttttagtatgataataattttgaactggaatatctttagcagctttaacattgaaattataaatccaataatcagttcccttaatatgatagattgctaattcgttgtcatcgtcaccatctctaccagtatcagcacgtgtcccttgctctaaacgatccactgtaaacttatcaccttgttttgcgtattttcctgaaggctgaactgcatctttatcaggtacttcaacaaaaagagcagcacgtttatcagttacagtaacagtcgtttcttctgatttagttgtttgagacgaagaagaactagtgttgttatttgtattaacactaattacaggacctaaattataagacttaatgtactgtttattaggtccacctattctaaagtaatgctttccgttcttaaatttgtatgaaccgccataagtcgtgatagtttcacccttatacaatttccaacggttattgtaagaggttctgccagttgaggtacgataaatgtaagtattatgagtaatcttacgtgttacaccatcaatgttggtagcctttatgtattgatccttgccgcttactttatagtaaagcgagccgtcaattttcacagggttgctttcaacagtgacatattgataggcattgtattttacacctgtgctgttaccatccttgtcgtaagctaaagcagtatgcataactgctttagtcgtagcagcttgtacttcattagttgtattagtcaaaacagccaagggtgcaactgtcattaatgtagctgcagaaattaatgcaatcttatttttcttcatcataatcatccttttcaaatctctacactgctattatattctctaaagctaattaaagcattaaaaagaagccaattaagtgaagtggacttctacttttgatattttcttttaatttattttttcaatgccgttgcctcagcttctgctgctgtgtttgaaggggttaatgtcaaacatatattaacaaatttaacatcactagctttaacataggcatcattaccaacttcaatttgatcaacgttacctgtagcatagaacttagtaccaactaaatggtagaataattctgccttgttttcacttggtacccaaatgtatatgagtttatctactttcagatttccaccttgttttacaatttttgcgccattgtggttttgcatagtaccgtcagcattatacacatcagtatccttgacaaatttgatatagccataatgttcgtgatcataatcatgctttactaattttttatcggcagttacatcaatagctaaaagccaattgtctgtaccttttattctatacattccagcttgtgctgcagttgatggaaaatgatcagcaaacggagtaacttctagtttatctacaataaacttcgtaccagctttgagattctttttgattgctttaccttgattatcataaatatttacaccgtaagcattttttacggtaacagttgcttcctcggcattagtattagtagcgttgtttgattcattgctggttaaatttgatgcagtattagtactaataactgggcctaaattatatgatctaatatattgcttacgtggcccacctactctaaagtaacgtttaccgtttttaaatttatatgatccaccatatgtagttacggtttcacctttataaaatttccatttcttactgttggcagtcataccataaggtgtcctttgagtagaagtccggtatatataagcattatgagtaatctttcgggttacaccatcaatattagttactttgatatattcatctttatctgtaactttgtaatattgacttccattgatagttactagttttggatctacatgaacactaccataaacgtaatatttatgaccggtactatttccatctttatcataagctaatgcgttgtgcataatagtcttggttattgaagaatctgcttgtactgtatgagcgctagttgtagtactcaggataggtgccgttcccattaaagctactacagaaattaacatgattttattttttttcattattaaccaccctttgaaaatctctatacttcaattatcttactttgtataaacttagacaacaaaaatagcatcaaatcatattgatttgatgctattaaggctaaaatttacaaatttagtcccaagctaattcataaaccttatttgaaacagttttatttttaccgttaacattagcatggtatgcaacagttaagtaaccgtgattttcatcaataatttggatactttcaacttcactatgttcacctgaaatatctaatccaccaaatgcacttaagtttacattttcccattgagattgatcattacgtgcataaaacggaatttttacaatttccttgtgatagtatgaccatgaaccattacttaaacttggtgatttttgactagtaatataaatattaccagaattatcaagatcataaccttgtacagagtttaaaacagatccatacaaaccatatactgtaaaactagtttcacattgataatttcccatatttacgaaaccattatttccagcctcatctaatgcattattaatgacatttaggtcataaattgaaaagtggcctgttccattattctcaatagtagcaattaaaagcatactataatctggtgaaactgctacttcagcgcgttccatttcatcaccagagcattgatcttcaggattacctgcgcggttcaagtatgctaaacgtgggaattcagtatttgatgaagcatatgatttgtatctaatatctgctcgagcaatttgagaagcccatttattcttgtttttagtaccaacgaaccatttaccagatctacctgaatattcccaagtttgggtgtgtccagctgctgcacctactaaagtaagcacaggggttgtcacgttgccacggaagccacgcaatacatgtgtttctgtctggttatttcttaactgtaaaccataaacatactttgatcctacattacctttttgaactacagctctgtaacctgtattcatatcgaatctatctaaaattctaatatttgttgcatctaacataataaaacctccgaaaaatttaaaaactactacttatcctgagtttgctcattcatctgtttagccacttccgcaaagatctcctgcacttcttgcctgttcagcttgaagccttttgcttcaaggctgttcactactgcgttgccaacacggttaatcttctgttcgtcagaaagattttctttgtcgtataagcgtacatagcttttcattaaactatctgcagtattgcggaattgctctaagcgtttattcttgaaatgaactctgctcaagatgccaatacctactacgctaattaccaataacgccagagtaatcagctcaacgtaatcatgaatatccataattgaatgaatcacctctcttttgatcaaacgatccaagggggctaacgaatgtccattggacttcacctctgtttgataatgttcaacaagacactaatacacttgatttatattagtttttagactaatataaatgtataagaaataaccgaaagctggtaaatgttccgccaagaattttattaacttaggttgttttctttttcatatctcgttgacaatatttactataagttaattaactaattatgtcaataaaaaaagctaaaaaactattattttttcgaacaagtattcctgaaaggcttggtatgattgagttagagcgcacaaaagaattagcaaaaaaatacaaaatgaatctccgtgaagtaaatgacaaggcaggtttaggtagaaattccatctataattggaagaatcaaagaccaggaattgatgcacttaatgcagtcgcagatgtactacatacgtcagccgattatttaagtggtaagacaaacaatcctagcccgtcacctaaaggtgatgaaactggtggtatttctattgatggtgaagtaccatatttctatcatggctacactattccagaagactacctgaacatagttcgtcaacttatggaacgtgatatcaaaaaaggacttattaaacgacatgacaacagcagatcagaataaacaagaactcatagactggttattagcctatgctaaaaaacgtgatattatggttgaattagttgaagtaaatccaacttacccatccatttctttaaagaactatagattcgctgtcattaatactaattggcatcatcaagaagaagtaccattttcaataggtcatgagattggtcacattatgctgactaatggtgaagtagattctcgtcaatatatcacttttacagaacagaattccgaagaaagtccagcagacatcttttcaataaagctaatctataattactcctgcaaaatgggtgattgcttcgaagatccaggtttatttatgcaagcatacgggataccaaatcgagtagctgatgcaactaaagagatatttaagcgagcagcttaaccatcaacttctatattgatttgattactaaagttttagcattagtttttacactacttaaaatccaattaaacaaaaaatcgctactcaattgagtaacgattttttctatccatccagttcaacgccttgtaagtccttcatcttgctataaaccgcgccacgttgacttgaatcaaactccagaataagcatatctccgccgcgaattacggtttgaccatttggtatgatctcatctccatcgcggtgaattgttcttaccctagtatcaaccggccattgaacctcagaaatggttttatcaaccagtctactgctctcatagaccggcagagccattgtatcagcctgaccagtatagttagccttatggtcactactcttgtccatagcggctgctagaagcccgtagataggcttaccgccaagaagttcatcaactaataacgcaatgaaggccaccacagctaatggcatcaagtgaagtaaggaccctaccatctcagtaattaagataatcgccgtaaatggtgcacgaatgattgctgcaaaatatcctgccattgaaaaaatcactaggttaactactaaacgctgcggtaacaagcctaactgtaccatcatcagtccataagttgcaccaatcaaagcgcccattgtcaaaattggcaggaagataccactaggaagacctgaatcataagcaacaatggagaaaacaattctcatgacataatagaaggctagcatccctacaatgccccaacctgttttagtgattatattcggcaatgccagaattaaccgattacctggaccggtgattaatggccaaaagtaagcaatcgggattaatattgccaaaggaataagtccatgcagccaacgaggtaaaatggtgattttagcatagaccttctttaaactaaataaaccaactttatataaatgacccaataagcctaataaaatccctaagataagcaagtgccagtacaacgaaatcggaaatgaatagttatattgaattgctagggcgtgacgaatgccaaacaagtttgaaacgacaaagtttgaagcaattgcgccagctaaagcattcatccaaactaatggtgaaaagttatggaatacttcttctaagacaaacaaggcaccactcaaaggagcgccaaaagcggcagacaaaccacttgaagcccctgttgcaagcagaattctagtttttaatttgttctgctggcatccctgagcaacaccttgaccaattgtcgagcccagctgtaatgatggtccttctggtcctaggaatagccctgtgccgataaccaagataccaccgattaatttccgccataaaattggaaaccattgtagtgatagcttcccttgcagttgcaattttacttctggaataccagaaccaccaacatggggatattgtttaacaaaataaccagcaattaccgctaccgcaataaagccaatgataatcgcaataaaccacaacggattctggtgcgctaattgaaacaagtataaccaaaaaccagatgtcttttcgattccaaatctaaataaaccaactactacgccggtacatattccgacaagtagtgcttggagcaacagtttaatattagttctgtttgcctcgtctttcattactttctccctcacaataaaaaaaacgtgtcacaaactattgtacaacaaaaagccagctagaaatgttctaactaacttttttgtttcatgtgaaactaattatttttcttcataccattcggtgtggaagacgccttcacgatcatttctaaggtaagtgtgcgcaccgaagtagtcacgttggccttggatcatattagctggcaagtttggattaaagattgattccaaccagttaagagctgcgctcaaagttggagttggcacaccacacttagtagcaaattcaactgacttacgcaaagctggcaagttttccttcatcaagccgcggaaataatcgtcttggaataggttcattagcttgccgttcttgtcataggctttttcaatatccttaagcattgcggaacgaatgatacaacctgcttcccaatcttgagcaattgacttgtatcttaagtcccaatcataagcttcagcagccattgtcaattgttggaaaccttgagcataggcaacagcttgggctaattgcaatgatttttcgaatacgtcaaccatatcatcaggaatttcaccattgtattcaaacttagttggtttaacgcccttttcaattgtcaagtgtgcttgcttactcatgaaacgtgccattacagcctcggctaccaccgttacaggagcgccaagtgcaacaccatcttcgagcatccagttaccagtacctttgtatgaagcaacgttcaaaatgtgatcgattacgtgatctggcgttaaatcatctttttgtgccaaaacctttgaagtgatttcgctaagatatgcttctaccttaccataattccatttatcaaaaatttctgacatttcatcatcgctcttgtgagcaacgtcacggagtaagttgtaaacttctgaaaattcctgcataataccgtattcgataccattgtgcaccattttgacatagtgaccagcaccttcaggtcccatgtagtagacacatggcttgccttcagtattcttagcggcaatagcttcaagaattggagcaacttccttataggctggttcatcaccacctggcatcaaagctggaccattcaaggcaccctcttcaccaccggaaacacccataccaataaaatgaatgccgtgcttttccatttcgtggaaacgacggttagtatcgtgataatttgagttaccaccatcgattaaaatatcgcctttatccaaaagcggcagcaatttttgcaaagtttggtccactggatcgcctgccataatttgaatcaaaatcttgcgtggcttttcaagtgagtttacgaactcttcccaggtgtagcaaggctttaatttatcatcttcatattttgcgaaagcatcaacttctggtttgtcgattgagaaaccggaaacggagaagccgtggtttctaacattcaaagcaaggttcttgcccataacagacaaaccgataacgccgaattgttgcatgtttattaattcctccattaatcaaagttcatcaagtattattatacgttctagcacgcaaaaaagcgaaaccaaaaggttccgctttttaaaatctagttaataatttttttgttattgggtaaaagtgtttcacacactgctcggtaatatttcctaggaaatattacttttattgatcaataccccaaagtaaaatgttaaatgctaatggtaatgtatccatcctttttagcctgttttaaagatgctagaacaaatttacgttgttgaccctttagctttttggctactttaacagctaaattaaagtcatactcgttttttctaatagcattttttgataactatctttgcccacagaaataggttgagaatcggagtttacagttacaatgtagctccacttgctaagtcgaggaatatttttaattgttatagctttatcaaacttagctactgcagttgaattgctgttgtctgcagcgttggcagtgacagacgatgctgaaaataatgctgcgagtaaagcagtagcaagtaaactaattagagcttttttagatttcataatttagcatctttttacacatagtgcttattggctaataagcattaattcatatccaacactgtctattataagcatctgtattctatttactagccaacagactattttatatttaaaatcgtatataaaatggggctatttcccaggaaatattttcccatacaaaaaagcgggacaaacgtctcgcttctttataattactcaaccaaattagtgttgtgaagcacctgaaaccgtatcaggagcaggatcctcttctggttctgattcttcatgttgagatgcacctgttgcagcgtcagcttctaagccgtacttttctgcaaagtaactgaatggcttcaagtcttcagcttgatacttcttgacaaaggctgggtcgtcaagtgagttcaattcagttgagtaaggcatttcgtgagtgtacttgacgtcgatcaacattggaccgtccatcttcttgaattcgtcgacagcatcttcgaattccttcttggtgcgaaccgttacacccttaacattcataccttcagcaacctttgaccagtcgttgtcaggaatgataacacctgataatggttggtgagattcatcttcttgttctgcttgaatgtaacctagtgtttcgttagtaaatacaatattcaaaacatgcatgttgtaacgagccatagtaagaagttcttggttcatcatagcaaaaccaccgtcaccagctaattgccatacttcacggtctgggtaaacagttgctgcagtaagagcagctggagcaccataacccatagttgcgtgcaagcctgaagtagtccacttttgatcatcatgcaagttcaaaagacggcatgagtcaacgttaacgttaccaacatcaatagcaaagatggcgttgtcatcagccttcttgttgataacatcccagattggttcaggacgtacaggcatttcatctgagttcttaaagcttgcttgccatgcatcccagttctcacggtctgcaatagcagccttgtaaagtggtgattcgctacgttcttcaccagcgtcaataattgctctcaaagccttcttagcatctgcaagcattgaaacatcagttgagtgacgcttaccaaacttagctgaatcaacatcaatttggataaccttagcgttcttagggaaccataaaactgagaatggtgagttgttacctacccaaacaactaagtcagttgcgctttggacttcttgagcagccttaggtccgatacggccgatagtacccatgtatgctgggaatttgtcttctactacacccttgcctaagtatgatgacataataggggtcttgaacttttcagcaaattccttaacttcttcaccagcatcctttgcacctaaaccaatgtacatggttgggttcttagcttctttcaaaagcttaacagcttcttcaactgaagccttagttggtgctggataattgtctgctggatgagcatccttgtttacacggaaggtgtcatcaatcttttgccaaccgtagtccttaggaataatgataactgcaggaccctttcttgcgtaggcttgacggatagcttcatcagttaaaattggaatttgttcagcggtcttagcttggcggcaccaaacactagcgttcaagaaccacttgtcttcatcaaaagcttggaagaagtcaatatcttgacggctagttggaacgttagcaacaattgctaccattggagtcttgtcaaacttagcatcatacaaaccattgaataagtgggcagcaccaggaccagctgaaccgaaacatacacccaacttaccagttaacttatattctgcagaagcagctaaagcaccagcttcttcgtgacgtacttcaataaatttcatcttatctctaaagtcatagatagcgttcatacttgagtcgaatgaaccacctgggaaaccgtagatatgatcaattccccaatcgtaaataactttaagcattgcatcagaaccattaatttttgtcatataagtgcatctccttaacttttgttctttcataatgtattaaaacactttttttcacatttgcaaaccgataaaatcaccgttattacgcaaatgaaaacgcttttgtaataataatcacttcacaagctttaccaaattcaatatctcaaaaagctgaatggtagcgttttatattgtgatttgatgaacattattatactaaatttcacttattttatgtatattcattgttacttatagtaaaaatttaagaaaaaattttttacaatttatttcatagctatccaatttagaaaaacgttattttataattttgcgcataaaaataacgtagaatactattcctacgctatttttgtgctattctactttttcactctagagtaacgcccattttgaatgtaaacactcaagattgccaagtcagctgggttaactcctgaaattcgttctgcttgagctaaagtttcaggacgaattttttcaaatttttgccgtgcctcagtagctaaaccttcgatttggtcataatcaatatctgctgggatttttttggcttcttgtctctttaagcgagcaattctggtttcttctttcttgatatagccagcatacttgataccaatctcaacttgttctttaacgtaacgatcgcctggaactttttcaccagttaaccgttcaatatcagcaatattaacattagggcgacgcaagaaaacatcggccttaacaccggccttcattggttcctgaccaatactttgcaaaaattcctgcacctcatcagttaaatgaaccgtaatttcatgcagtctcgtctttgcatcttcaatcgcatgcttcttttcttcaaatcgtgcgaagcgttcgtcagaaattaagcccagatcatgaccatattcagtcaaacgcaagtctgcgttatcattgcgtaaaatcaaacgatattctgctctactagtaagtagacgatatggttcattcgtccctttggttaccaagtcatcgattaacacgccaatgtaagcatcgttacggcctaaggtaaatcctggcttatcttgagcagataatgccgcattaattcctgcaattaaaccttgaccagctgcttcttcataacctgatgttccattcatctggcctgcagtaaataaatgctttacgtttttggtttccaaagtatgcttcaattgccatggttcaaccacatcgtattcaattgcatatcctggtcgcatcatttccgcatgttctaatcccgcaacagaatgaatcatctttaattgaatttcttctggcattgaagttgaaaagtcgcctacataaacttccttggtagtctttccttctggttcaaggaaaatttggtggcgatccttatctgcaaagcggacaactttgtcttcaattgaaggacaataacgtgggcctacacccttgataattccagagaacatcggtgcacggtcaagattgtttctaataatcgtgtgtgtggttggattagtataagtcatccaacaagaaatttgtttttgtaaataatcttcatcacgactttcatatgaaaagtgccgtgggattttatcaccaggttcttcctcagttttagaatagtcaattgtattgccgttaacacgtggaggagtaccggttttaaaacgacgcagcttaaaacctaacttttctagattttccgacagcttaattgaaggagtagtgttatttggacctgaagaataagtcaattccccaataataattttaccgcgagccgctgtacctgtagtcaaaacaacgcttttagcatgatacttcgcaccagtattggtaatcacacctttgcagacgccatcttcaactaccaattcatccacgatagcctgacgcaaggtcaagttgggcgtattttcgatcgtatccttcatgtgttcatgatattgccacttatcagcttgagcacgtagcgcacgcacagctggccccttacccgtatttaacatccgcatttggatataggtagcatcaatgttctttcccatttgaccacctaaagcatcaatctcacggacaactgtccctttagctggtccaccaacagatggattacatggcataaaggccaccatatccaaaccaatcgtaaccagcaaagttttttgtcccatgtgggcacttgccaacgcagcttcacatccagcatgcccagcaccgacaacgattacatcatattcatttgaatcatatgttttaaccattttcatcctactttcctaaacagaattgactaaataattgcgtgattaattcatctggggcactttcaccagtgatttcacctaaagtatcccaagcaccagtaaaatcaatttgtgcaatatcaacagggacgccatcttcaactgcttgaattacatcttccaattctttcttagccttatgcaataaggaagcttggcgttgattggttaccataatttgatcattagaattttcaatcccagcaaaaaatagcttattaatcaattcttcaagcgcatctaagttttgttctttcaaaatcgaagttgaaataacatcactacccgttagtttctccatctcagtagttgttattttttgacctaaatccgacttatttaagatcacgattcgcttcttgtcctttgttgcttcaattaaggcttgatcttcagctgttaatgcttgactagcatcgattaacaacaagaccagatctgctcgctccaaggccttttttgatctttctacaccaattttttccaccttatcttcagtgtggtggattccagcagtatcaattagctctagcggtactccttttacagacacatattcttctaacgtatcacgcgttgttccagccacatcggtcacaatcgctttgtcgctttgagtcagataattcaataaagaagactttcccacattaggacgaccaacaattgcagtagccaaaccattgcgcaagatttttccttcttgtgctgtcttcaataagcgattaattttatcaattactgatctagatgtgtctgccatctgttttgcggtaacagtatctgcatcatactctggataatcgatattaacctcaacgttagccaaagtattcagaatttcctgccgcattgcctgaatcttgtgtaacaatccaccagctaattgaccaacagccacttgtcgtgccttatccgtcttggcccgaacgatatccatcacactctcagcttgagttaagtcaattcgtccgttcacaaaagcacgtttagtaaattcaccaggatcagccattcgcgcaccgtgactcagcaacaattgtaaaatatgattagttaccacgattccgccatggcaattgatttctacaatatcttcacgtgtaaaggtcttgggcgcacgcagcactgtcaccattgcttcatcaatcgttttcccagtatccggatcgataatatgaccatagtgaatagtatgtgtcggcaccttgcttagatcttcgcctttaaaaacctcatcagcaatcttaattgcatcctcaccagacattcttacgattgaaattccgccttcaccgatgggggttgaaattgctgcaatagtatcgaactctgtcaaagtttgagccataattcttcccttttctcaataaaaaaagcgcattataccaccacgaataaccatgatggataaagcactttgactactttatctaaaaatcattttagactaatattcttttatttctttttgcgtcctaaacgcttgtaagcccttcttagtttacgtttgcgttcacgctcagcctcagcctttgcttcttgctctcttctatatttaatagggttttgcaagataaaggtttgaagcgcctggaacaagttggaaattacccagtaaagtgtaatagctgactggaagtttaaggccatcacaccaaccatgatagacattccgtacatcattactttggtcattccattttgcgatgattttggcgtcgataattgactaatatacgtcgataagaacgtaaagatcattgctaaaataggcatgatgtaatatggatcgggcttgcttaaatccatccataagaagcgcccagtttgtaactgcggtgtacgtaaaatcgcaccatacagtgcatacataactggcaactggatcaggacaggcaaacatccagtataaggatttacgcctgcttctttataaagcttgttagtttcttgttgtaataatgttcttgattcagtgtcacgtcctggatatttcttacgcaactcattaatttgtggttggatgctttgcatcttagtagtacttcgaattgaaatagcattcaaaggtactaagatgacacgaacaatgacggtgaagacaataattgcccagccataactgttccccattaacttagctagccacaaaataaaagctgacatgtaataaacgatccaacggtcccaccaattaccacttgtatgtgagattggcgttgcttgaccatttgctcccgtagtagcacatcctgtcaatacaacagcaagtattgctactgctaagactgcaagaagacgtttgacatttctcttggtcagaatgtccttcaatctatttttcctcaactttatctggcatttcttcaataatatgagctaacgataatgcgtgaagcaagtttttacgcacctgagccatattaaaatcgcgagcataaggtcgcgtaatgactaaaaaatcaacatgcggattaatctgcaatttttcttcatcaatcacggcccgaatataacgcttgagtcgattacgtgcgactgcggtatgaccaacctttttgcccacagaaattcctactcgaaagtgtttattttctgttttttctaccttataaatgacaaaagctcggttagcgactgagtcgccagattcgaaaacttgctggaaatctttttcagattttactcgataagactttctcaaaacgtttcattccactctagtagactaaaaaaaccactgggattcagtggtttaagcagataagacttttctaccttttgcacggcgtcttgctaaaaccttacggccatttgatgtgctcatacgcttcataaaaccgtgaacacgtgaacggtgacgcttcttaggttggtaagttctcttagttgtcatattaaactgcacctccataaatttttgtgccaattgcacaatttcttattaaggatagcacgaaaagccataaaaaccaagtattttaagaaaaaaagactcctgaattgtcaaattaagtgcaacagttaggctatgaaggaacgtattgcttgaagagttcttctgctgtgtgatattggaggattcgacgatgtttgcggttaatggcatcagttgcctgttgaacataagcagctgacttatctttcatgcttttgcccttagggaagaattgacgcagaagtccattgcagttctcatttgtgcctctttcccaaggagaatatggatgagcaaagtagatctgacatcctttgattttggtcatatccgcaaactcagaaccattgtcaaacgtaattgatttaaaccaattaggatgtctgtcaatctccttttgaagcagtctttgacaagtactggcccgatagtcaggaattttgataacaacctcaaaacgagtggttctttcagtcagtgtcattaaggcaggttgatttttacgtctgacgcctttaaccaaatcgccttcccagtgcaggggaacttttctgttttcaacttctttaggccgctgttcaatcgaattgccaagattctttttatgcggagcatggccaccatgactatgatggcgtttgtttctgcgtcttttaagcttcattggcaggtcgatattgcttatatccagcaatccttgatcaatataacgatagacagtgggcgtgctaggacatggataatttggcataatcctgtgaaattcaccaacgaattcatcaatgctagtggcatcaaatttggctttaaagcgtctgcttagcattctgaaaaagacggcatagtgttgcagtggattacacttatagcagtttctgcggcgcttttcatgataaatttgtgcagtatcagcgtaatagtgctcatacaagacatagctgctgtctctttgcaggacactgcctcgtctaatttcacggctgatagttgatttatgacagcctacttcttgagcgatagcagtgcaggaggttatgccagaatcaagcagagcttgaatttgtccacgttgttcgctgttcaattgatgataatgcttggaaatgctagaatttgagttggtcatgaagatcttcctttcttgatttttggtcacatcaagtttaggtcttcatggcctttttgtttaacacttagtgttgcacttcaattttaaattcgggagaaaaaaagacttttaaatcccgtgaatattttctaagaattcattgtttttcatgtggataaaaaataaaatatttttcttacgtataatttccacaagataattcccaacgttttccacaactcgcatggtgttaaaaacttaattcacaccatgtggataacgcatatggtattttacctcaagtattgatagaatagtatccataattcacagctgtactgtgcataaattaacagttttgctcttatcatgtcaaaatgtacatatcactttaatagctatcaacaggctgtgtactttgttggtttcttttttcacctgtggaaaaccagttaagtaaatggtaaaataaatttgctttttactaactgggggaatgtaca
